(19) United States
(12) Patent Application Publication
(10) Pub. No.: US 2019/0201542 A1
(43) Pub. Date: Jul. 4, 2019

(54) ANTI-DLL3 DRUG CONJUGATES FOR TREATING TUMORS AT RISK OF NEUROENDOCRINE TRANSITION

(71) Applicant: ABBVIE STEMCENTRX LLC, NORTH CHICAGO, IL (US)

(72) Inventors: Laura SAUNDERS, SAN FRANCISCO, CA (US); Robert A. STULL, ALAMEDA, CA (US); Daniel R. HYDUKE, SAN FRANCISCO, CA (US); Enying YOU, SOUTH SAN FRANCISCO, CA (US)

(73) Assignee: ABBVIE STEMCENTRX LLC, NORTH CHICAGO, IL (US)

(21) Appl. No.: 16/302,975

(22) PCT Filed: May 19, 2017
(86) PCT No.: PCT/US17/33601

§ 371 Date: Nov. 19, 2018

Related U.S. Application Data
(60) Provisional application No. 62/339,776, filed on May 20, 2016.
(60) Provisional application No. 62/505,539, filed on May 12, 2017.

(51) Int. Cl. A61K 47/68; C07K 16/28; A61K 31/5517; A61P 35/00; A61K 47/65; A61K 47/54; G01N 33/574

(52) U.S. Cl. CPC A61K 47/6803; C07K 16/28; A61K 47/6849; A61K 31/5517; A61P 35/00; C07K 2317/56; A61K 47/542; A61K 47/545; G01N 33/57496; C07K 2317/24; C07K 2317/565; A61K 47/65

(57) ABSTRACT

Methods of treating tumors at risk for neuroendocrine transition using anti-delta-like ligand 3 (DLL3) antibody drug conjugates (ADCs) are provided.

### CROSS REFERENCED APPLICATIONS

[0001] This application claims the benefit of U.S. Provisional Application No. 62/339,776 filed on May 20, 2016 and U.S. Provisional Application No. 62/505,539 filed on May 12, 2017, each of which is incorporated herein by reference in its entirety.

### SEQUENCE LISTING

[0002] This application contains a sequence listing that has been submitted in ASCII format via EFS-Web and is hereby incorporated by reference in its entirety. Said ASCII copy, created on May 16, 2017, is named sc1606WOO1_Sequence_Listing and is 663 KB (679,869 bytes) in size.

### FIELD OF THE INVENTION

[0003] This application generally relates to methods of treating cancer and any recurrence, relapse, or metastasis thereof. In a broad aspect, the present invention relates to the use of delta-like ligand 3 (DLL3) antibody drug conjugates for the treatment of cancer.

### BACKGROUND OF THE INVENTION

[0004] Conventional treatments for cancer include chemotherapy, radiotherapy, surgery, immunotherapy, targeted therapeutics or combinations thereof. Unfortunately, certain cancers are non-responsive or minimally responsive to such treatments. For example, in some patients tumors exhibit gene mutations that render them non-responsive despite the general effectiveness of selected therapies. Moreover, depending on the type of cancer and what form it takes some available treatments, such as surgery, may not be viable alternatives. Limitations inherent in current standard of care therapeutics are particularly evident when attempting to treat patients who have undergone previous treatments and have subsequently relapsed. In such cases the failed therapeutic regimens and resulting patient deterioration may contribute to refractory and/or relapsed tumors, which often manifest themselves as a relatively aggressive disease that ultimately proves to be incurable. Given the highly aggressive nature of relapsed disease, the sooner the relapse is detected and treated the better the prognosis.

[0005] Although there have been great improvements in the diagnosis and treatment of cancer over the years, overall survival rates for many solid tumors have remained largely unchanged due to failure of existing therapies to prevent relapse, tumor recurrence and metastases. Thus, it remains a challenge to develop more targeted and potent therapies for cancer, especially for patients with recurrent cancer.

### SUMMARY OF THE INVENTION

[0006] In a broad aspect, the present invention provides methods of treating adenocarcinoma at risk of transitioning to a neuroendocrine phenotype and methods of reducing or inhibiting recurrence of an adenocarcinoma at risk of transitioning to a neuroendocrine phenotype. Other aspects of the invention provides isolated anti-DLL3 antibodies, isolated anti-ASCL1 antibodies, and corresponding antibody drug conjugates (ADCs).

[0007] In one embodiment, a method of treating an adenocarcinoma at risk of transitioning to a neuroendocrine phenotype in a subject is provided. Such a method comprises administering to the subject a therapeutically effective amount of an anti-DLL3 antibody drug conjugate, or a pharmaceutically acceptable salt thereof, wherein the antibody drug conjugate (ADC) comprises the formula M-[L-D]n wherein: M comprises an anti-DLL3 antibody; L comprises an optional linker; D comprises a cytotoxic agent; and n is an integer from 1 to 20. In certain embodiments the adenocarcinoma expresses relatively little or no detectable level of DLL3 prior to transition to a neuroendocrine phenotype. Significantly, in certain embodiments the adenocarcinoma expresses relatively little or no detectable level of DLL3 protein (e.g., it is DLL3^{-/low}) at the time of treatment with a DLL3 ADC though it may express marker proteins (e.g., ASCL1) indicating that it is at risk of transitioning to a tumor comprising a neuroendocrine phenotype.

[0008] In another embodiment, a method of reducing or inhibiting recurrence of an adenocarcinoma at risk of transitioning to a neuroendocrine phenotype in a subject is provided. Such a method comprises administering to the subject a therapeutically effective amount of an anti-DLL3 antibody drug conjugate, or a pharmaceutically acceptable salt thereof, wherein the antibody drug conjugate (ADC) comprises the formula M-[L-D]n wherein: M comprises an anti-DLL3 antibody; L comprises an optional linker; D comprises a cytotoxic agent; and n is an integer from 1 to 20. In selected embodiments the adenocarcinoma expresses relatively little or no detectable levels of DLL3 prior to transition to a neuroendocrine phenotype. Again, in certain embodiments the adenocarcinoma expresses relatively little or no detectable level of DLL3 protein (e.g., it is DLL3^{-/low}) at the time of treatment with a DLL3 ADC though it may express marker proteins (e.g., ASCL1) indicating that it is at risk of transitioning to a tumor comprising a neuroendocrine phenotype.

[0009] In some embodiments, the adenocarcinoma comprises ASCL1⁺ cells. In certain embodiments, the adenocarcinoma shows reduced expression of one or more of Retinoblastoma 1 (RB1), Repressor Element-1 Silencing Transcription Factor (REST), SAM pointed domain-containing Ets transcription factor (SPDEF), Prostaglandin E2 Receptor 4 (PTGER4), and ETS-related gene (ERG), as compared to a control sample. In other embodiments, the adenocarcinoma shows increased expression of paternally expressed 10 (PEG10) as compared to a control sample.

[0010] In some aspects of the invention, the subject is or has undergone a targeted therapy or chemotherapy. In other aspects, the adenocarcinoma is recurrent, refractory, relapsed or resistant. In yet other aspects, the subject has previously undergone a debulking procedure.

[0011] As indicated, the present invention provides methods of treating adenocarcinoma and methods of preventing, reducing or inhibiting recurrence of adenocarcinoma at risk of transitioning to a neuroendocrine phenotype. In some aspects, the adenocarcinoma occurs in lung, prostate, genitourinary tract (including bladder), gastrointestinal tract, thyroid, or kidney.

[0012] In one aspect, the adenocarcinoma comprises prostate cancer. In certain embodiments, the prostate cancer comprises castration resistant prostate cancer (CPRC). In further embodiments, the adenocarcinoma is resistant to androgen deprivation therapy and in certain embodiments the CPRC is resistant to androgen deprivation therapy (AR-CPRC).

[0013] In another aspect, the adenocarcinoma comprises lung cancer. In certain embodiments, the lung cancer comprises non-small cell lung cancer. In a further embodiment, the adenocarcinoma is characterized as having an activating EGFR mutation. In yet another embodiment, the adenocarcinoma is resistant to EGFR inhibitor therapy.

[0014] The present invention comprises anti-DLL3 antibodies or ADCs comprising anti-DLL3 antibodies. In some aspects, the anti-DLL3 antibodies bind specifically to an epitope within the DSL domain of a DLL3 protein set forth as SEQ ID NO: 3 or 4. In certain aspects, the anti-DLL3 antibody specifically binds to an epitope comprising amino acids G203, R205 and P206 (SEQ ID NO: 4).

[0015] In one embodiment, the anti-DLL3 antibody comprises or competes for binding to human DLL3 protein with an antibody comprising a light chain variable region set forth as SEQ ID NO: 149 and a heavy chain variable region set forth as SEQ ID NO: 151. In another embodiment, the anti-DLL3 antibody comprises three complementarity determining regions of a light chain variable region set forth as SEQ ID NO: 149, and three complementarity determining regions of a heavy chain variable region set forth as SEQ ID NO: 151. In yet another embodiment, the anti-DLL3 antibody comprises residues 24-34 of SEQ ID NO: 149 for CDR-L1, residues 50-56 of SEQ ID NO: 149 for CDR-L2, residues 89-97 of SEQ ID NO: 149 for CDR-L3, residues 31-35 of SEQ ID NO: 151 for CDR-H1, residues 50-65 of SEQ ID NO: 151 for CDR-H2 and residues 95-102 of SEQ ID NO: 151 for CDR-H3, wherein the residues are numbered according to Kabat. In certain embodiments, the anti-DLL3 antibody comprises a light chain variable region comprising an amino acid sequence set forth as SEQ ID NO: 405 and a heavy chain variable region comprising an amino acid sequence set forth as SEQ ID NO: 407.

[0016] In some aspects, the anti-DLL3 antibody is selected from the group consisting of a monoclonal antibody, primatized antibody, multispecific antibody, bispecific antibody, monovalent antibody, multivalent antibody, anti-idiotypic antibody, diabody, Fab fragment, F(ab′)₂ fragment, Fv fragment, and ScFv fragment; or an immunoreactive fragment thereof. In certain aspects, the anti-DLL3 antibody is selected from the group consisting of a chimeric antibody, a CDR-grafted antibody, and a humanized antibody.

[0017] As indicated, certain embodiments of the invention comprise an antibody drug conjugate of the formula M-[L-D]n, wherein D comprises a cytotoxic agent. In some embodiments, the cytotoxic agent is a pyrrolobenzodiazepine (PBD), an auristatin, a maytansinoid, a calicheamicin, or a radioisotope. In certain embodiments, the cytotoxic agent is a pyrrolobenzodiazepine (PBD). In some aspects, the PBD is covalently linked to the anti-DLL3 antibody via a linker.

[0018] In certain aspects the invention comprises an ADC wherein the cytotoxic agent is a pyrrolobenzodiazepine (PBD) comprising formula AC:

[chemical structure]

wherein: the dotted lines indicate the optional presence of a double bond, and wherein only one of the dotted lines in a given ring can be a double bond; R² is selected from H, OH, ═O, ═CH₂, CN, R, OR, ═CH—R^{D}, ═C(R^{D})₂, O SO₂ R, CO₂R, COR, and halo, where R^{D} is selected from R, CO₂R, COR, CHO, CO₂H, and halo; R⁶ and R⁹ are each independently selected from H, R, OH, OR, SH, SR, NH₂, NHR, NRR′, NO₂, Me₃Sn and halo; R⁷ is selected from H, R, OH, OR, SH, SR, NH₂, NHR, NRR′, NO₂, Me₃Sn and halo; R¹⁰ is the linker L connected to the anti-DLL3 antibody; Q is selected from O, S and NH; R¹¹ is either H, or R or, where Q is O, R¹¹ may be SO₃M, where M is a metal cation; R and R′ are each independently selected from optionally substituted C₁₋₁₂ alkyl, C₃₋₂₀ heterocyclyl and C₅₋₂₀ aryl groups, and optionally in relation to the group NRR′, R and R′ together with the nitrogen atom to which they are attached form an optionally substituted 4-, 5-, 6- or 7-membered heterocyclic ring; X is selected from O, S, and N(H); R^{2″}, R^{6″}, R^{7″}, R^{9″}, and X″ are as defined according to R², R⁶, R⁷, R⁹, and X, respectively; and R″ is a C₃₋₁₂ alkylene group, which comprises a chain optionally interrupted by one or more heteroatoms, one or more rings, or both one or more heteroatoms and one or more rings, wherein the optional one or more rings are optionally substituted. In certain aspects, R² is R, wherein R is an optionally substituted C₁₋₁₂ alkyl; R⁶ and R⁹ are H; R⁷ is OR, and wherein R is a C₁ alkyl; Q is O, and wherein R¹¹ is H; and/or X and X″ are O.

[0019] In another aspect, the invention comprises an ADC wherein, following cleavage from any linker, the PBD comprises:

[chemical structure]

[0020] In other aspects of the invention, the ADC comprises a linker. In one aspect, the linker comprises a cleavable linker. In certain aspects, the cleavable linker comprises a dipeptide. In further aspects, the dipeptide is Phe-Lys, Val-Ala, Val-Lys, Ala-Lys, Val-Cit, Phe-Cit, Leu-Cit, Ile-Cit, Phe-Arg, or Trp-Cit. In yet a further aspect, the dipeptide is Val-Ala. In yet other aspects, the linker further comprises a maleimide group.

[0021] In certain aspects, the antibody drug conjugate comprises the structure:

[chemical structure]

wherein the asterisk indicates the point of attachment of the linker to the cytotoxic agent, and wherein the wavy line indicates the point of attachment to the remaining portion of the linker.

[0022] Another aspect of the invention provides methods of selecting a subject for treatment with an anti-DLL3 antibody drug conjugate (ADC). Such methods comprise: (a) contacting a tumor sample obtained from the subject with an ASCL1 antibody, wherein the ASCL1 antibody may comprise or compete for binding to a human ASCL1 protein with an antibody comprising a light chain variable region set forth as SEQ ID NO: 521 and a heavy chain variable region set forth as SEQ ID NO: 523; a light chain variable region set forth as SEQ ID NO: 525 and a heavy chain variable region set forth as SEQ ID NO: 527; a light chain variable region set forth as SEQ ID NO: 529 and a heavy chain variable region set forth as SEQ ID NO: 531; a light chain variable region set forth as SEQ ID NO: 533 and a heavy chain variable region set forth as SEQ ID NO: 535; a light chain variable region set forth as SEQ ID NO: 537 and a heavy chain variable region set forth as SEQ ID NO: 539; a light chain variable region set forth as SEQ ID NO: 541 and a heavy chain variable region set forth as SEQ ID NO: 543; a light chain variable region set forth as SEQ ID NO: 545 and a heavy chain variable region set forth as SEQ ID NO: 547; a light chain variable region set forth as SEQ ID NO: 549 and a heavy chain variable region set forth as SEQ ID NO: 551; a light chain variable region set forth as SEQ ID NO: 553 and a heavy chain variable region set forth as SEQ ID NO: 555; a light chain variable region set forth as SEQ ID NO: 557 and a heavy chain variable region set forth as SEQ ID NO: 559; a light chain variable region set forth as SEQ ID NO: 561 and a heavy chain variable region set forth as SEQ ID NO: 563; a light chain variable region set forth as SEQ ID NO: 565 and a heavy chain variable region set forth as SEQ ID NO: 567; a light chain variable region set forth as SEQ ID NO: 569 and a heavy chain variable region set forth as SEQ ID NO: 571; or a light chain variable region set forth as SEQ ID NO: 521 and a heavy chain variable region set forth as SEQ ID NO: 573; (b) detecting the ASCL1 antibody bound to the tumor sample; and (c) selecting a subject having an ASCL1⁺ tumor sample for treatment with an anti-DLL3 antibody drug conjugate (ADC). In certain embodiments the ASCL1 antibody will comprise or compete with the aforementioned antibodies. In the step of detecting the ASCL1 antibody, the antibody may be conjugated or otherwise associated with a detectable label, or this step may be performed using a secondary and/or tertiary antibody that specifically binds to the ASCL1 antibody to amplify the signal, as is well known in the art. In other selected embodiments the selected subject may express relatively little or no detectable levels of DLL3 at the time of selection.

[0023] In a further aspect, the invention comprises an antibody that binds to human ASCL1 comprising a light chain variable region and a heavy chain variable region, wherein the light chain variable region has three CDRs of a light chain variable region set forth as SEQ ID NO: 521, SEQ ID NO: 525, SEQ ID NO: 529, SEQ ID NO: 533, SEQ ID NO: 537, SEQ ID NO: 541, SEQ ID NO: 545, SEQ ID NO: 549, SEQ ID NO: 553, SEQ ID NO: 557, SEQ ID NO: 561, SEQ ID NO: 565 or SEQ ID NO: 569 and the heavy chain variable region has three CDRs of a heavy chain variable region set forth as SEQ ID NO: 523, SEQ ID NO: 527, SEQ ID NO: 531, SEQ ID NO: 535, SEQ ID NO: 539, SEQ ID NO: 543, SEQ ID NO: 547, SEQ ID NO: 551, SEQ ID NO: 555, SEQ ID NO: 559 and SEQ ID NO: 563, SEQ ID NO: 567, SEQ ID NO: 571 or SEQ ID NO: 573. As described in some detail below the CDRs may be defined according to Kabat, Chothia, MacCallum or AbM methodology.

[0024] It will be appreciated that certain aspects of the methods of selecting a subject for treatment with an anti-DLL3 ADC comprise the use of ASCL1 antibodies for immunohistochemistry. In one embodiment, detecting the ASCL1 antibody is performed using immunohistochemistry. In some embodiments, the tumor sample is chemically fixed. In certain embodiments, the tumor sample is chemically fixed using formalin. In other embodiments, the tumor sample is paraffin embedded.

[0025] In other aspects, the methods of selecting a subject for treatment with an anti-DLL3 ADC can further comprise any or all of the steps: contacting the tumor sample with one or more agents that detect one or more of Retinoblastoma 1 (RB1), Repressor Element-1 Silencing Transcription Factor (REST), SAM pointed domain-containing Ets transcription factor (SPDEF), Prostaglandin E2 Receptor 4 (PTGER4), and ETS-related gene (ERG); detecting the one or more agents in the tumor sample; and observing a reduced expression of one or more of Retinoblastoma 1 (RB1), Repressor Element-1 Silencing Transcription Factor (REST), SAM pointed domain-containing Ets transcription factor (SPDEF), Prostaglandin E2 Receptor 4 (PTGER4), and ETS-related gene (ERG), as compared to a control sample.

[0026] In still other aspects, the methods of selecting a subject for treatment with an anti-DLL3 ADC can further comprise the steps of: contacting the tumor sample with an agent that detects paternally expressed 10 (PEG10); detecting the agent in the tumor sample; and observing an increase in expression of paternally expressed 10 (PEG10) as compared to a control sample.

[0027] In yet a further aspect, each of the aforementioned methods of selecting a subject for treatment with an anti-DLL3 ADC can further comprise the step of administering an anti-DLL3 antibody drug conjugate to the subject.

[0028] In this regard certain aspects of the invention comprise a method of treating a subject suffering from a tumor at risk of transitioning to a neuroendocrine phenotype comprising the steps of (a) contacting a tumor sample obtained from the subject with an ASCL1 antibody; (b) detecting the ASCL1 antibody bound to the tumor sample; (c) selecting a subject having an ASCL1⁺ tumor phenotype; and (d) treating the subject selected in step (c) with an anti-DLL3 antibody drug conjugate (DLL3 ADC). In certain preferred aspects the tumor will comprise an adenocarcinoma. In further embodiments the subject may tested for DLL3 expression (e.g., using a DLL3 antibody). In such embodiments the subject may be treated with a DLL3 ADC even though the adenocarcinoma comprises an ASCL1⁺DLL3^{-/low} phenotype.

[0029] In some aspects of the aforementioned methods of selecting a subject for treatment with an anti-DLL3 ADC, the tumor is at risk of transitioning to a neuroendocrine phenotype. In certain aspects, the subject is and/or has undergone a targeted therapy or chemotherapy. In further aspects, the tumor is recurrent, refractory, relapsed or resistant. In yet other aspects, the subject has previously undergone a debulking procedure.

[0030] In certain aspects of the methods of selecting a subject for treatment with an anti-DLL3 ADC, the tumor occurs in lung, prostate, genitourinary tract, gastrointestinal tract, thyroid, or kidney.

[0031] In one aspect, the tumor comprises prostate cancer. In a certain aspect, the prostate cancer comprises castration resistant prostate cancer. In yet a further aspect, the prostate cancer is resistant to androgen deprivation therapy.

[0032] In another aspect, the tumor comprises lung cancer. In certain aspects, the lung cancer comprises small cell lung cancer. In a further aspect, the lung cancer comprises non-small cell lung cancer. In still another aspect, the tumor is characterized as having an activating EGFR mutation. In yet a further aspect, the tumor is resistant to EGFR inhibitor therapy.

[0033] The foregoing is a summary and thus contains, by necessity, simplifications, generalizations, and omissions of detail; consequently, those skilled in the art will appreciate that the summary is illustrative only and is not intended to be in any way limiting. Other aspects, features, and advantages of the methods, compositions and/or devices and/or other subject matter described herein will become apparent in the teachings set forth herein. The summary is provided to introduce a selection of concepts in a simplified form that are further described below in the Detailed Description. This summary is not intended to identify key features or essential features of the claimed subject matter, nor is it intended to be used as an aid in determining the scope of the claimed subject matter.

### BRIEF DESCRIPTION OF THE FIGURES

[0034] FIGS. 1A and 1B provide, in a tabular form, contiguous amino acid sequences (SEQ ID NOS: 21-407, odd numbers) of light and heavy chain variable regions of a number of murine and humanized exemplary DLL3 antibodies;

[0035] FIG. 2 depicts in schematic form the results of domain level mapping analysis of exemplary DLL3 antibodies;

[0036] FIG. 3A-3C provide, in tabular form, contiguous amino acid sequences of light (FIG. 3A) and heavy chain (FIG. 3B) variable regions, and the nucleotide sequences (FIG. 3C) of the light chain and heavy chain variable regions of exemplary murine anti-ASCL1 antibodies (SEQ ID NOS: 521-573).

[0037] FIG. 4 depicts DLL3 expression in androgen resistant castration resistant prostate cancer (AR-CRPC);

[0038] FIG. 5 depicts DLL3 expression in metastatic prostate cancer;

[0039] FIG. 6 depicts DLL3 expression in androgen resistant prostate cancer with neuroendocrine differentiation (NEPC);

[0040] FIG. 7 depicts DLL3 expression over time during mouse host castration as the tumor initially regresses but rapidly relapses as NEPC;

[0041] FIG. 8 depicts PEG10, DLL3, SPDEF, PTGER4 and ERG expression over time in LTL331 during mouse host castration as the tumor initially regresses but rapidly relapses as NEPC;

[0042] FIG. 9 depicts DLL3 expression in AR-CRPC;

[0043] FIG. 10 depicts EGFR mutated, TKI resistant lung adenocarcinoma tumors that exhibit elevated levels of DLL3 after small cell transformation and EMT;

[0044] FIG. 11 depicts DLL3 and CHGA expression on a common cancer array with multiple types of tumor; and

[0045] FIG. 12 provides, in tabular form, immunohistochemistry results for ASCL1 expression in various small cell lung cancer PDX samples with anti-ASCL1 antibody clone SC72.2.

### DETAILED DESCRIPTION OF THE INVENTION

[0046] The invention may be embodied in many different forms. Disclosed herein are non-limiting, illustrative embodiments of the invention that exemplify the principles thereof. Any section headings used herein are for organizational purposes only and are not to be construed as limiting the subject matter described. For the purposes of the instant disclosure all identifying sequence accession numbers may be found in the NCBI Reference Sequence (RefSeq) database and/or the NCBI GenBank® archival sequence database unless otherwise noted.

### I. Introduction

[0047] DLL3 expression has surprisingly been found to correlate with a number of tumor types and, as a determinant, may be exploited in the treatment of such tumors. Among such tumors, DLL3 expression in adenocarcinoma has been found to correlate with tumors that have become resistant to a targeted cancer therapy or chemotherapy and have transitioned to a neuroendocrine phenotype. The present invention provides methods and compositions for identifying tumors at risk for transitioning to a neuroendocrine phenotype, such that patients having the disclosed risk factors are identifiable as candidates for treatment with an anti-DLL3 antibody drug conjugate. For example, as detailed herein, several proteins are expressed in tumors during the transition to a neuroendocrine phenotype and prior to detectable DLL3 expression. Such marker proteins are indicative as to subjects that may respond to treatment with a DLL3 ADC even though the tumor expresses relatively little or no detectable level of DLL3 at the time of treatment. Also as disclosed herein, tumors treated previously with a targeted therapy are particularly vulnerable to undergoing a neuroendocrine transition and are susceptible to the methods of treatment or prophylaxis as disclosed herein. As such, identification of the disclosed risk factors and/or biomarkers as disclosed herein provides new therapeutic strategies for treating DLL3^{-/low} tumors with an anti-DLL3 antibody drug conjugate. It will be appreciated that such treatments may be used to prevent or retard the incidence of recurrent, refractory, relapsed or resistant tumors that would ultimately exhibit a neuroendocrine phenotype.

### II. Risk Factors for Neuroendocrine Transition

[0048] Numerous tumors, and particularly adenocarcinomas, can transition, transform, or differentiate to a neuroendocrine phenotype and take on neuroendocrine features. The mechanism of this transition is not well understood, but the neuroendocrine phenotype may arise from rare neuroendocrine cells present in the original tumor. Upon certain therapeutic treatments such cells may preferentially survive and expand as the cells of the original tumor are eliminated. Alternatively, the tumor may undergo a histological transformation to neuroendocrine cells. In any event such transitions may stimulated, induced or otherwise triggered by therapeutic intervention designed to treat the tumor. In other cases such neuroendocrine transitions may be spontaneous.

[0049] The present application provides risk factors for tumors that are capable of, or likely to, transition to a neuroendocrine phenotype. In one aspect of the invention, tumors at risk for neuroendocrine transition are identified by increased expression of particular markers (e.g., ASCL1) and/or reduced expression of selected markers, as disclosed herein. In another aspect of the invention, the present inventors have discovered that tumors previously treated with a targeted therapy, as defined herein, are also at risk of transitioning to a neuroendocrine phenotype. Such tumors at risk may be effectively treated using an anti-DLL3 antibody drug conjugate, notwithstanding that these tumors show negative or low expression of DLL3 (DLL3^{-/low}) at the time of treatment.

[0050] A. The Neuroendocrine Phenotype

[0051] True or canonical neuroendocrine tumors (NETs) arising from the dispersed endocrine system are relatively rare, with an incidence of 2-5 per 100,000 people, but highly aggressive. Neuroendocrine tumors occur in the kidney, genitourinary tract (bladder, prostate, ovary, cervix, and endometrium), gastrointestinal tract (colon, stomach), thyroid (medullary thyroid cancer), and lung (small cell lung carcinoma and large cell neuroendocrine carcinoma). These tumors may secrete several hormones including serotonin and/or chromogranin A that can cause debilitating symptoms known as carcinoid syndrome. Such tumors can be denoted by positive immunohistochemical markers such as neuron-specific enolase (NSE, also known as gamma enolase, gene symbol=ENO2), CD56 (or NCAM1), chromogranin A (CHGA), and synaptophysin (SYP) or by genes known to exhibit elevated expression such as ASCL1. Unfortunately traditional chemotherapies have not been particularly effective in treating NETs and liver metastasis is a common outcome.

[0052] Pseudo neuroendocrine tumors (pNETs) are tumors that genotypically or phenotypically mimic, resemble or exhibit common traits with canonical neuroendocrine tumors. Pseudo neuroendocrine tumors or tumors with neuroendocrine features are tumors that arise from cells of the diffuse neuroendocrine system or from cells in which a neuroendocrine differentiation cascade has been aberrantly reactivated during the oncogenic process. Such pNETs commonly share certain phenotypic or biochemical characteristics with traditionally defined neuroendocrine tumors, including the ability to produce subsets of biologically active amines, neurotransmitters, and peptide hormones. Histologically, such tumors (NETs and pNETs) share a common appearance often showing densely connected small cells with minimal cytoplasm of bland cytopathology and round to oval stippled nuclei. For the purposes of the instant invention, the factors identified herein as characterizing a risk of neuroendocrine transition are equally applicable to identifying a risk for a pseudo neuroendocrine transition.

[0053] B. Biomarkers for Identifying Tumors at Risk of Neuroendocrine Transition

[0054] As disclosed herein, changes in expression of various biomarkers can be used to identify tumors at risk of transitioning to a neuroendocrine phenotype. Representative biomarkers include (1) an increase in expression of one or more of Achaete-scute Homolog 1 (ASCL1), Paternally Expressed 10 (PEG10), or Serine/Arginine Repetitive Matrix 4 (SRRM4), and (2) a decrease or reduction of expression of one or more of Retinoblastoma 1 (RB1), Repressor Element-1 Silencing Transcription Factor (REST), SAM Pointed Domain-containing Ets Transcription Factor (SPDEF), Prostaglandin E2 Receptor 4 (PTGER4), or ETS-Related Gene (ERG). These relative changes in expression may be attributed to a change in the number of cells expressing a marker, i.e., more or fewer cells within the sample characterizable as having positive, low or negative expression. Alternatively or in addition, these relative changes may be the result of a change in the level of expression in any given cell or group of cells.

[0055] In selected aspects of the invention the expression of the selected determinant may be measured using flow cytometry comprising fluorescent antibody staining. When using such techniques tumor cells may be defined as exhibiting positive, low and negative marker levels based fluorescent signals. Cells with negative expression (i.e. “FMO⁻”) may be defined as those cells expressing less than, or equal to, the 95th percentile of expression observed with an isotype control antibody in the channel of fluorescence in the presence of the complete antibody staining cocktail labeling for other proteins of interest in additional channels of fluorescence emission. Those skilled in the art will appreciate that this procedure for defining negative events is referred to as “fluorescence minus one control”, or “FMO control”, staining. Cells with expression greater than the 95th percentile of expression observed with an isotype control antibody using the FMO staining procedure described above may be defined as “positive” (i.e. “FMO⁺”). As defined herein there are various populations of cells broadly defined as “positive” including those that may be defined as FMO⁺. A cell is defined as FMO⁺ if the mean observed expression of the antigen is above the 95th percentile determined using FMO staining with an isotype control antibody as described above. The positive cells may be termed cells with low expression (i.e. “FMO-lo”) if the mean observed expression is above the 95th percentile determined by FMO staining and is within one standard deviation of the 95th percentile. Alternatively, the positive cells may be termed cells with high expression (i.e. “FMO-hi”) if the mean observed expression is above the 95th percentile determined by FMO staining and greater than one standard deviation above the 95th percentile. In other embodiments the 99th percentile may preferably be used as a demarcation point between negative and positive FMO staining. A sample that is FMO⁺ for a particular marker, for example, ASCL1⁺, has a detectable level of expression for the marker as compared to a control sample. A tumor that is positive for a particular marker can have detectable levels of the marker in one or more cells.

[0056] In certain aspects of the invention increased expression of a given marker (ASCL1⁺) is meant to encompass any significant increase in expression level of the marker in a sample (e.g., a tumor sample) as compared to expression level of the corresponding marker in a control sample (e.g., normal, non-tumorigenic tissue). For example, an increased or higher expression level for a given marker can be any statistically significant increase in the expression level of the marker of at least 5%, 10%, 15%, 20%, 25%, 30%, 40%, 50%, 60%, 70%, 80%, 85%, 90%, 95%, 96%, 97%, 98%, 99%, 100%, 200%, 400% or more as compared to a reference expression level in a control sample. In accordance with the instant disclosure tumor samples showing such increases in expression may be classified as “+” or “hi” when compared to appropriate controls. Alternatively, an increase in the expression level for a given marker can be any fold increase of at least 1.5-fold, 2-fold, 3-fold, 4-fold, 5-fold, 6-fold, 7-fold, 8-fold, 9-fold, 10-fold, 12-fold, 14-fold, 16-fold, 20-fold or more over the value for the expression level of the corresponding marker in a control sample. In accordance with the instant disclosure tumor samples showing such increases in expression level may be classified as “+” or “hi” when compared to appropriate controls. In either case increased expression of a particular marker as observed in a sample may be the result of an increase in the number of positive cells expressing the marker in the sample, and/or an increase in the level of marker expression in any given cell or group of cells within the sample.

[0057] Decreased, lower or reduced expression level, or a loss of expression for a given marker refers to any significant decrease in the expression level of the marker in a sample as compared to the expression level of the corresponding marker in a control sample. For example, a significant reduction in the expression level of a marker in a subject sample of at least 5%, 10%, 15%, 20%, 25%, 30%, 40%, 50%, 60%, 70%, 80%, 85%, 90%, 95%, 96%, 97%, 98%, 99% or more as compared to a reference expression level in a control sample. In accordance with the instant disclosure tumor samples showing such increases in expression level may be classified as “−” or “low” when compared to appropriate controls. Alternatively, a decrease in the expression level for a given marker can be any fold decrease of at least 1.5-fold, 2-fold, 3-fold, 4-fold, 5-fold, 6-fold, 7-fold, 8-fold, 9-fold, 10-fold, 12-fold, 14-fold, 16-fold, 20-fold or more as compared to the expression level of the corresponding marker in a control sample. In accordance with the instant disclosure tumor samples showing such increases in expression level may be classified as “−” or “low” when compared to appropriate controls. Decreased expression of a particular marker as observed in a sample may be the result of a decrease in the number of positive cells expressing the marker in the sample, and/or a decrease in the level of marker expression in any given cell or group of cells within the sample.

[0058] A control or control sample provides a reference point for measuring changes in expression of markers in the sample. The control may be a predetermined value based on a group of samples or it may be a single value based on an individual sample. The control may be a sample tested in parallel with the subject sample. In certain aspects a control sample may comprise, for example, any normal tissue sample or any tumor sample that has not undergone a transition to a neuroendocrine phenotype.

[0059] It will be appreciated that the expression level of a marker can be measured by expression of protein levels of any given marker or by nucleic acid expression levels of any given marker, for example, the expression level of the RNA that encodes the marker. Moreover, expression levels of more than one marker may be determined for a given sample thorough the use of different detection reagents (e.g., different antibodies) or through a combination of different methodologies. Singularly or in combination such expression measurements may be used to provide a descriptive cell or tumor phenotype (e.g., ASCL1⁺, DLL3^{-/low}).

[0060] Various assays to measure for expression of a marker are known in the art and are discussed in more detail below and in the Examples. Representative techniques for assessing protein levels include, for example, fluorescence detection assays, such as fluorescence microscopy or flow cytometry, immuno-assays, such as immunohistochemistry, or enzyme detection assays. In preferred aspects immunohistochemistry (IHC) techniques will be used to provide cell or tumor phenotypes in accordance with the teachings and markers herein. By way of example, antibodies that specifically recognize Achaete-scute Homolog 1 (ASCL1), Paternally Expressed 10 (PEG10), or Serine/Arginine Repetitive Matrix 4 (SRRM4), Retinoblastoma 1 (RB1), Repressor Element-1 Silencing Transcription Factor (REST), SAM Pointed Domain-containing Ets Transcription Factor (SPDEF), Prostaglandin E2 Receptor 4 (PTGER4), or ETS-Related Gene (ERG) are disclosed herein, commercially available or otherwise known in the art and may be used for IHC. Representative assays to measure RNA expression levels of these markers include, for example, RT-PCR, such as quantitative RT-PCR. Any art-recognized techniques for assessing protein or RNA expression levels may be used in accordance with the present invention to assess marker expression as described herein that indicates a risk of neuroendocrine transition.

[0061] In certain preferred embodiments the assays may comprise immunohistochemistry (IHC) assays or variants thereof (e.g., fluorescent, chromogenic, standard ABC, standard LSAB, etc.) or immunocytochemistry or variants thereof (e.g., direct, indirect, fluorescent, chromogenic, etc.).

[0062] In this regard certain aspects of the instant invention comprise the use of labeled ASCL1 for immunohistochemistry (IHC). More particularly IHC (e.g., ASCL1 IHC) may be used as a diagnostic tool to aid in the diagnosis of various proliferative diseases including tumors at risk of transitioning to a neuroendocrine phenotype and to monitor the potential response to treatments, e.g., DLL3 ADC therapy. Compatible diagnostic assays may be performed on tissues that have been chemically fixed (compatible techniques include, but are not limited to: formaldehyde, glutaraldehyde, osmium tetroxide, potassium dichromate, acetic acid, alcohols, zinc salts, mercuric chloride, chromium tetroxide and picric acid) and embedded (compatible methods include but are not limited to: glycol methacrylate, paraffin and resins) or preserved via freezing. Such assays can be used to guide treatment decisions and determine dosing regimens and timing.

[0063] As known in the art immunohistochemistry techniques may be used to derive an H-score as known in the art using the antibodies to the disclosed markers. Briefly tumor sections are viewed (preferably by brightfield microscopy) and marker (e.g., ASCL1) expression on sectioned tumor is noted to derive an H-score. The exemplary H-score may be obtained by the formula: 3×percentage of strongly staining nucleus+2×percentage of moderately staining nucleus+percentage of weakly staining nucleus, giving a range of 0 to 300.

[0064] Such H-scores may be used to indicate which patients may be amenable to treatment with a suitable composition (e.g., an anti-DLL3 ADC). H-scores of approximately 90, approximately 100, approximately 110, approximately 120, approximately 130, approximately 140, approximately 150, approximately 160, approximately 170, approximately 180, approximately 190 or approximately 200 or above on a 300 point scale may be used in selected embodiments to indicate which patients may respond favorably to the treatment methods of the instant invention (e.g., with a DLL3 ADC and/or chemotherapeutic agent). For example, in certain embodiments, a patient to be treated with an DLL3 ADC will have an ASCL1 H-score of at least 90 (i.e., the tumor is ASCL1⁺) on a 300 point scale. In other embodiments a patient to be treated with a DLL3 ADC as set forth in the instant invention will have an ASCL1 H-score of at least 120. In yet other embodiments a patient to be treated with the DLL3 ADCs of the instant invention will have an H-score of at least 180. For the purposes of the instant disclosure any tumor exhibiting an H-score of 90 or above on a 300 point scale will be considered ASCL1⁺ and subject to treatment with any known therapy useful for treating neuroendocrine tumors, including targeting of transcriptional targets of ASCL1, as described further below.

[0065] In other selected embodiments an H-score comprising a 200 point scale may also be used to select or diagnose patients that may respond to treatments as disclosed herein. In such 200 H-score scales an H-score of 120 is approximately equivalent to an H-score of 180 on a 300 H-score scale. In both cases (e.g., 120/200 or 180/300) such H-scores may be classified as positive (e.g., ASCL1⁺ in that they are both above an H-score of 90 on a 300 point scale and/or ≥10% of the constituent cells express ASCL1 as described below) and are suggestive of patients that may respond favorably to the treatment methods of the instant invention.

[0066] In other embodiments patient selection may be based on the measurement of percent of positively stained cells in a tumor sample. In this regard patients exhibiting a certain percentage of positively stained cells in an IHC sample when interrogated with a marker antibody, for example an anti-ASCL1 antibody, would be considered ASCL1⁺ and would be selected for treatment in accordance with the teachings herein. In such embodiments tumor samples exhibiting greater than 10%, greater than 20%, greater than 30%, greater than 40% or greater than 50% positive cell staining may be classified as positive for a marker (e.g., ASCL1+) when measured as percent positive cells. In other embodiments tumor samples exhibiting greater than 60%, greater than 70%, greater than 80%, greater than 90% or greater than 95% positive cell staining may be classified as marker positive when measured as percent positive. In certain preferred aspects the ASCL1⁺ tumor will express ASCL1 in ≥10%, ≥20%, ≥30%, ≥40%, or ≥50% of the constituent cells when measured as percent positive. In each of the forgoing embodiments patients suffering from ASCL1 percent positive tumors may be treated with DLL3 ADCs as set forth herein. While the ASCL1 marker was exemplified it will be appreciated that the other disclosed markers (e.g., PEG10 and SRRM4) are also predictive as to which patients will be candidates for the treatment regimens of the instant invention and are expressly included within its scope.

[0067] In still other embodiments patient selection may be predicated on the percent of marker positive cells staining with a certain intensity. By way of example, a tumor with >20% of the cells exhibiting 2+ ASCL1 intensity or greater will be ASCL1+ and a candidate for treatment with a DLL3 ADC. In other embodiments a patient will be a candidate for treatment with a DLL3 ADC or other chemotherapeutic agent if ≥20%, ≥30%, ≥40%, ≥50%, ≥60%, ≥70% or ≥80% of the tumor cells exhibit 1+ intensity or greater when stained with a marker antibody (e.g., an anti-ASCL1 antibody) and examined in accordance with standard IHC protocols as disclosed herein. In other certain embodiments a patient will be a candidate for treatment with a DLL3 ADC or other chemotherapeutic agent if ≥20%, ≥30%, ≥40%, ≥50%, ≥60%, ≥70% or ≥80% of the tumor cells exhibit 2+ intensity or greater when stained with a marker antibody and examined in accordance with standard IHC protocols as disclosed herein. In yet other selected embodiments a patient will be a candidate for treatment with a DLL3 ADC or other chemotherapeutic agent if ≥10%, ≥20%, ≥30%, ≥40% or ≥50% of the tumor cells exhibit 1+ intensity or greater when stained with a marker antibody and examined in accordance with standard IHC protocols as disclosed herein. In still other embodiments a patient will be a candidate for treatment with a DLL3 ADC or other chemotherapeutic agent if ≥10%, ≥20%, ≥30%, ≥40% or ≥50% of the tumor cells exhibit 2+ intensity or greater when stained with a marker antibody and examined in accordance with standard IHC protocols as disclosed herein.

[0068] Yet another embodiment comprises a method of treating a subject having a tumor comprising tumor cells wherein ≥10% of the tumor cells exhibit 1+ intensity or greater when stained with a marker antibody and examined in accordance with standard IHC protocols comprising the step of administering an anti-DLL3 ADC. With regard to each of the aforementioned embodiments it will be appreciated that the intensity of staining with a marker antibody may be readily determined using standard pathology techniques and methodology familiar to those of skill in the art.

[0069] In certain aspects the present invention provides a method of selecting a subject for treatment with an anti-DLL3 antibody drug conjugate by detecting ASCL1 expression in a tumor sample. Such a method can comprise (a) contacting an anti-ASCL1 antibody with a tumor sample obtained from the subject; (b) detecting the anti-ASCL1 antibody in the tumor sample; and (c) selecting a subject having an ASCL1⁺ tumor sample for treatment with an anti-DLL3 antibody drug conjugate (ADC). Concurrently or sequentially, antibodies that specifically bind to one or more of the additional markers disclosed herein (e.g., PEG10, SRRM4, RB1, REST, SAM, SPDEF, PTGER4, and ERG) may be used to further assess or characterized the risk of neuroendocrine transition. For example, the combination of particular markers may be quantified as presenting different levels of risk to guide selection of appropriate treatments, including anti-DLL3 ADC therapy. In certain embodiments the tumor sample will express relatively low levels of DLL3.

[0070] As discussed above certain marker levels and DLL3 expression will be decreased or reduced as compared to a reference expression level in a control sample. More specifically, tumors at risk of transitioning to a neuroendocrine phenotype may express lower levels of one markers selected from the group consisting of Retinoblastoma 1 (RB1), Repressor Element-1 Silencing Transcription Factor (REST), SAM Pointed Domain-containing Ets Transcription Factor (SPDEF), Prostaglandin E2 Receptor 4 (PTGER4), and ETS-Related Gene (ERG). In addition, such tumors may express relatively low levels of DLL3 protein and may be classified as ASCL1⁺, DLL3^{-/low} wherein DLL3⁻ is indicative of non-detectable or barely detectable levels of expression and DLL3^{low} is indicative of relatively depressed levels of DLL3 found in certain tumors (e.g., adenocarcinoma). In this regard DLL3^{low} will be held to mean any tumor comprising a DLL3 expression level that is reduced by 5%, 10%, 15%, 20%, 25%, 30%, 40%, 50%, 60%, 70%, 80%, 85%, 90%, 95%, 96%, 97%, 98%, 99% or more as compared to a reference expression level in a control sample (e.g., a DLL3+ or hi tumor). In certain embodiments DLL3 expression will be reduced by 50%, 60%, 70%, 80%, 85%, 90%, 95%, 96%, 97%, 98%, 99% or more as compared to a reference expression level in a control sample. In still other embodiments DLL3 expression will be reduced by 80%, 85%, 90%, 95%, 96%, 97%, 98%, 99% or more as compared to a reference expression level in a control sample while in other embodiments DLL3 expression will be reduced by 90%, 95%, 96%, 97%, 98%, 99% or more as compared to a reference expression level in a control sample. In selected embodiments DLL3 expression will be reduced by at least 90%, by at least 95%, by at least 97% or by at least 99% when compared to a sample obtained from a DLL3⁺ tumor.

[0071] In other embodiments the tumor sample may compared to control tumor samples known not to express DLL3 (negative control). When such comparisons are made the tumor sample obtained from the subject may be classified as DLL3⁻ if it exhibits substantially the same level of DLL3 as the negative control.

[0072] In yet other embodiments DLL3^{-/low} tumors may readily be identified by trained pathologists using IHC in view of the instant disclosure. More specifically tumor samples may be obtained, preferably fixed and stained with anti-DLL3 antibodies as disclosed herein and read using art-recognized techniques. In certain embodiments the expression of DLL3 may be visually determined by the pathologist using appropriate positive and negative controls. In other embodiments the scoring could be based on a derived H-score may comprise the measurement of percent of positively stained cells in a tumor sample. With respect to the latter a tumor may be found to be DLL3^{-/low} if less than about 20%, 15%, 10%, 8%, 5%, 4%, 3%, 2% or 1% of the cells stain positive using standard IHC techniques. In other embodiments a tumor may be found to be DLL3^{-/low} if less than about 0.8%, 0.6%, 0.4%, 0.2% or 0.1% of the cells stain positive when interrogated with a DLL3 antibody as described herein. Thus, in a preferred aspect the invention will comprise treatment of a patient suffering from a tumor wherein the percentage of cells in the DLL3^{-/low} tumor that stain positive when interrogated with a DLL3 antibody is less than about 10%. In another preferred aspect the invention will comprise treatment of a patient suffering from a tumor wherein the percentage of cells in the DLL3^{-/low} tumor that stain positive when interrogated with a DLL3 antibody is less than about 5%. And in another preferred aspect the invention will comprise treatment of a patient suffering from a tumor wherein the percentage of cells in the DLL3^{-/low} tumor that stain positive when interrogated with a DLL3 antibody is less than about 1%.

[0073] In other embodiments the skilled artisan may make a qualitative judgement as to what constitutes a DLL3^{-/low} tumor upon review of the slides based on factors such as relative intensity, staining patterns, sample origin and preparation, antibody and reporter employed, etc. As previously alluded to any determination as to the level of DLL3 expression is made in the context of appropriate positive and negative controls and is relatively accurate. Accordingly such determinations are indicative as to which patients are susceptible to treatment with DLL3 ADCs as described herein.

[0074] More generally, based on the teachings herein one skilled in the art could readily determine which tumors comprise DLL3^{-/low} phenotypes using a number of compatible techniques and, as potential neuroendocrine tumors, are candidates for treatment with an anti-DLL3 ADC using the disclosed methods.

[0075] Moreover, representative antibodies for use in such methods include novel anti-DLL3 and anti-ASCL1 antibodies produced as described in the Examples provided herein. FIGS. 1A and 1B and FIGS. 3A and 3B provide, respectively, annotated sequences of numerous anti-DLL3 and anti-ASCL1 binding domains. More particularly the amino acid sequences of the light chain variable regions and heavy chain variable regions of the ASCL1 antibodies are depicted in FIGS. 3A and 3B, respectively, and are represented by SEQ ID NOS: 521-573, odd numbers. Similarly representative anti-DLL3 antibodies compatible with the disclosed diagnostic and therapeutic methods are set forth in FIGS. 1A and 1B (SEQ ID NOS: 21-407, odd numbers).

[0076] C. Targeted Therapies Associated with Risk of Neuroendocrine Transition

[0077] Targeted cancer therapy, as used herein, is a therapy that targets specific types of cancer, targets specific molecules that are associated with tumors, and/or targets specific molecules needed for tumor development, tumor survival, tumor growth, and/or metastases. Targeted cancer therapies offer the benefit of matching a specific therapeutic agent to the underlying molecular alterations of a tumor, affording an improvement in the selective inhibitory effect on tumor cells while minimizing toxic side effects to normal cells and tissues. This strategy includes targeting driver oncogene mutations or altered gene expression pathways in tumors. As one example, androgen deprivation therapy, which removes androgens essential for prostate cancer growth, is an effective treatment for many patients with prostate adenocarcinoma. As another example, tumor-specific aberrations in the epidermal growth factor receptor (EGFR) protein or the anaplastic lymphoma kinase (ALK) locus, which occur in some lung adenocarcinomas can be targeted by EGFR tyrosine kinase inhibitors (EGFR-TKIs) like erlotinib and gefitinib, or by targeted ALK inhibitors like crizotinib and ceritinib respectively (Roviello, PMID: 26082421).

[0078] Notwithstanding the initial clinical response often observed using targeted therapies, numerous patients ultimately develop resistance to the agents via a variety of mechanisms. In addition, the present inventors have discovered that tumors treated with a targeted therapy present a higher incidence of transition to a neuroendocrine phenotype as compared with tumors having been treated with a non-targeted therapy, i.e., therapies effective for many or all tumor types, such as chemotherapy and radiation.

[0079] While anti-DLL3 antibody drug conjugates may be used to treat any adenocarcinoma at risk of transitioning to a neuroendocrine phenotype, in particular aspects of the invention, the adenocarcinoma is prostate cancer, lung cancer, or bladder cancer given the targeted therapies currently in use for treating these cancer types.

[0080] C.1. Lung Cancer

[0081] As described above, patients with lung adenocarcinoma having an activating EGFR mutation can be treated with targeted therapy using EGFR inhibitors (e.g. EGFR-TKIs). An activating epidermal growth factor receptor (EGFR) mutation is any mutation that results in activation of the epidermal growth factor receptor. For example, an activating EGFR mutation can comprise deletion of the EGFR exon 19, or a L858R point mutation in exon 21 of EGFR.

[0082] Cancer cells having activating EGFR mutations and are treated with an EGFR inhibitor can acquire resistance to EGFR inhibitor therapy. Tumor cells that are resistant to EGFR inhibitor therapy are at risk of transitioning to a neuroendocrine phenotype. Several mechanisms of acquired resistance are known and include, for example, a substitution of methionine for threonine at position 790 (T790M), small cell transformation, MET amplification, epithelial-mesenchymal transition, and PIK3CA mutation.

[0083] Resistance to EGFR-TKIs is observed after a median time of 10 months. The primary mechanism of acquired resistance is the emergence of a dominant second-site EGFR T790M mutation, seen in 50-65% of patients. This gatekeeper mutation, which may represent a minor allele present in the tumor before EGFR-TKI therapy, hinders the ability of the drugs to bind the active conformation of the EGFR protein. Deep sequencing technologies have shown that pre-existing EGFR T790M clones are detected in up to 68% of patients before treatment with an EGFR-TKI, and that treatment with an EGFR-TKI allows for the emergence of the EGFR T790M tumor that is resistant to those inhibitors (Watanabe M. et al., 2015). Second generation EGFR-TKIs (e.g., dacomitinib, afatinib and neratinib) have a higher affinity for EGFR, but have shown limited activity in patients with acquired resistance. Alternatively, anti-EGFR monoclonal antibodies like cetuximab do show some clinical benefit after acquired resistance to EGFR-TKIs, but combining these antibodies with second-generation EGFR-TKIs have adverse side effects. Third-generation EGFR-TKIs (e.g., rociletinib and AZD9291), designed to selectively target both the initial activating and the dominant acquired T790M resistance mutations, have shown clinical activity in early trials, although amplification of other oncogenic signaling molecules may ultimately give rise to rociletinib-resistance in patients (Haringsma et al., 2015). As is the case for the EGFR-TKIs, patients taking targeted ALK inhibitors like crizotinib do show a clinical benefit over standard chemotherapy, but inevitably relapse. Acquired resistance to crizotinib is seen in the clinic due to additional second-site ALK mutations or due to ALK gene amplification (Roviello G. et al., 2015). Again, both of these mechanisms of crizotinib-resistance may represent the emergence of tumor cell subclones with altered target properties in the context of selection pressure due to the targeted therapeutic.

[0084] An alternative mechanism of acquired resistance to targeted therapies does not involve acquisition of or selection for secondary mutations or gene amplifications in the therapeutic target; instead, the tumor appears to undergo a histological transformation. For example, in about 10-15% of EGFR-mutant lung adenocarcinomas, while these tumors maintain the original EGFR mutation, they no longer respond to EGFR-TKIs and instead display a histological transformation to resemble small cell lung cancer (SCLC) (Niederst M. J. et al., 2015; Sequist L. V. et al., 2011). Strikingly, acquired resistance to third-generation EGFR-TKIs due to SCLC transformation was seen in 2 of 12 patients (17%) biopsied after relapse (Piotrowska Z. et al., 2015). Separately, two additional cases of EGFR mutated lung adenocarcinoma transitioning to SCLC following treatment with a third generation EGFR-TKI have been reported (Ham J. S. et al., 2015). Cell lines generated from SCLC-transformed EGFR-mutant lung adenocarcinomas are resistant to gefitinib as well as to the third-generation EGFR-TKI WZ4002 (Niederst M. J. et al., 2015). The lack of response to the EGFR-TKIs reflects a reduction or silencing of EGFR expression, since the EGFR mutation status in these tumors is unchanged relative to the original tumor (Niederst M. J. et al., 2015). The transition to a SCLC phenotype is accompanied by acquisition of genetic changes which include expression of neuroendocrine markers, acquisition of ASCL1 expression, and loss or reduction of RB1 (Niederst M. J. et al., 2015).

[0085] Transformation of ALK rearranged lung adenocarcinoma into SCLC as a resistance mechanism has also been reported in six patients in response to ALK inhibitor targeted therapies crizotinib and alectinib (Levacq D. et al., 2016; Fujita S. et al., 2016; Caumont C. et al., 2016; Cha Y. J. et al. 2016; Takegawa, N. et al., 2016; Miyamoto S. et al., 2016). These transformed tumors retain ALK translocations, and gain additional mutations typically seen in SCLC, including loss and mutation of RB1, TP53 and PTEN. Sometimes the tumors retain a mix of both adenocarcinoma and SCLC, with chemotherapeutic and target agents influencing clonal detection.

[0086] EGFR-mutant lung adenocarcinomas have also been observed to undergo histological transformation into large cell neuroendocrine carcinomas (LCNEC) during treatment with EGFR-TKIs (Kogo M. et al., 2015). In one instance, the original tumor expressed EGFR and RB1 protein as detected by IHC, but following transformation to LCNEC, expression of both EGFR and RB1 protein was lost, while the EGFR mutation was retained (Kogo M. et al., 2015). Likewise, acquired resistance to the ALK inhibitor crizotinib has been reported to occur through transition to LCNEC (Omachi N. et al., 2014; Caumont C. et al., 2016). Again, the original ALK fusion was maintained in the LCNEC cells, while no additional ALK mutations that could confer resistance were detected.

[0087] It is probable that as is observed in the acquisition of secondary mutations that confer targeted therapy resistance, emergence of SCLC-transformed non-small cell lung tumors represents a selection for tumor cell subclones from an originally heterogenous tumor. Despite being classified as non-small cell lung cancer, about 10-20% of non-small cell lung cancers exhibit some neuroendocrine properties (Berendsen H. H. et al., 1989), and a subset of lung adenocarcinoma (30/171; 17%) express ASCL1 and other neuroendocrine genes, and have poor prognoses (Fujiwara T. et al., 2011). That targeted therapies can mediate changes in tumor phenotype due to tumor heterogeneity is exemplified by the case of a patient diagnosed with lung adenocarcinoma with an EGFR L858R mutation, who was treated with erlotinib, and whose tumor underwent transformation into SCLC. The SCLC tumor retained the original EGFR mutation with a similar allele frequency, while gaining common SCLC mutations including an activating mutation in PIK3CA and loss or reduction of both TP53 and RB1. Treatment of the transformed SCLC tumor with cisplatin/etoposide, standard of care for SCLC, led to the reemergence of lung adenocarcinoma with an L858R EGFR mutation that was again sensitive to erlotinib. At time of autopsy, this patient harbored two SCLC transformed tumors in the lung and liver, as well as lung lesion with adenocarcinoma histology. All three sites harbored the original EGFR mutation, with the adenocarcinoma lesion harboring a T790M resistance mutation, whereas the SCLC lesions did not (Niederst M. J. et al., 2015). Together, these data are consistent with rare neuroendocrine cells present in the original tumor, which in the context of selection pressure due to the targeted therapeutic, become the bulk of the tumor provided additional mutations are present or acquired (e.g., loss or reduction of RB1).

[0088] As demonstrated in the Examples herein, DLL3 expression is increased in lung adenocarcinoma that is resistant to EGFR inhibitor therapy and has transitioned to a neuroendocrine phenotype. The present invention provides that anti-DLL3 antibody drug conjugates may be used as an effective therapeutic treatment strategy for patients with lung adenocarcinoma identified as at risk for the transitioning to a neuroendocrine phenotype, including those patients having received EGFR inhibitor therapy.

[0089] Such tumors are typically recurrent, refractory, relapsed or resistant. In particular aspects of the invention, the lung adenocarcinoma tumor comprises non-small cell lung cancer previously treated with EGFR inhibitor therapy.

[0090] C.2. Prostate Cancer

[0091] Histological transformation as a resistance mechanism is not confined to lung adenocarcinoma; tumor transformation in response to targeted therapy is also observed in prostate adenocarcinoma. Early stage prostate adenocarcinoma is treated with radiation, while locally advanced and metastatic prostate adenocarcinoma is treated with medical or surgical castration to target androgen receptor (AR)-driven tumor growth (Parimi V. et al., 2014). However, most patients eventually relapse and become resistant to androgen deprivation therapy, progressing to a lethal stage of the disease termed castration resistant prostate cancer (CPRC). CPRC is estimated to kill 27,540 men in the US in 2015 (American Cancer Society) and the 5-year overall survival for CRPC is 12.6%, making it the most deadly and aggressive subtype of prostate cancer. Similar to what is observed for lung adenocarcinoma, the mechanisms underlying the development of targeted-therapy resistance in CRPC vary, but can be grouped into (1) restored AR signaling via acquisition of secondary mutations or AR amplification, (2) bypass of direct signaling mediated by the AR protein through acquisition of other oncogenic drivers in the AR signaling pathway, or (3) complete AR independence (Watson et al., 2015). Notably, complete AR independence in CRPC can manifest as histologically transformed tumors with small cell neuroendocrine features (e.g., expression of classic neuroendocrine markers like CHGA, ENO2, NCAM1, SYP, etc). ASCL1, the main neuroendocrine transcription factor that drives SCLC, is upregulated by androgen deprivation and is associated with onset of the neuroendocrine phenotype in CRPC (Rapa I. et al., 2013). Loss or reduction of RB1 and concurrent overexpression of AURKA and MYCN, are enriched in CRPC (Robinson D. et al., 2015; Beltran H. et al., 2011).

[0092] Transformation of CRPC into a tumor with a small cell neuroendocrine phenotype results in disease with distinct clinical features: rapid progression with large tumor masses, high frequency of visceral disease, frequent bone metastasis, and disproportionately low PSA levels for the large disease burden, poor response to hormone therapies, and short response to chemotherapeutics (median survival 1 year) (Aparicio A. et al., 2011). About 10-20% of autopsied patients who die from CRPC have small cell neuroendocrine differentiation (Turbat-Herrera E. A. et al., 1988; Tanaka M. et al., 2001). The degree of neuroendocrine differentiation increases with disease progression and in response to androgen deprivation therapy (Parimi V. et al., 2014). With the recent advent of total androgen blockade therapies, there could be a significant increase in CRPC with neuroendocrine features (Zhang X., 2015). A direct link between androgen deprivation therapy and development of CRPC with neuroendocrine differentiation is further supported by studies comparing intermittent androgen deprivation versus continuous androgen deprivation therapy, wherein it was observed that intermittent androgen deprivation delayed or prevented neuroendocrine differentiation (Sciarra A., 2003).

[0093] The factors that determine which prostate tumors will undergo a neuroendocrine transition are not well understood. Some data suggests that almost all prostate adenocarcinoma tumors are heterogeneous with sites of focal neuroendocrine differentiation (Cindolo L. et al., 2007; Nelson C. E. et al., 2007). Neuroendocrine cells are indistinguishable from typical adenocarcinoma cells by routine hematoxylin and eosin staining, but can be distinguished with typical neuroendocrine immunohistochemistry (CHGA, SYP, NCAM1, etc.; Priemer D. S. et al., 2016). The number of neuroendocrine cells is associated with neoplastic progression rate, and clusters of neuroendocrine cells as opposed to individual isolated neuroendocrine cells, are associated with poor prognosis (Cindolo L. et al., 2007). Rare neuroendocrine cells might contribute to prostate adenocarcinoma through production of neuropeptides and growth factors that support the rapidly proliferating cells and promote angiogenesis. Additional genetic mutations like loss or reduction of RB1 or amplification of MYC might further contribute to a full transition to a small cell neuroendocrine phenotype. One early marker that has been shown to be expressed at the onset of neuroendocrine transition is PEG10 (Akamatsu S. et al., 2015). Another gene significantly upregulated is PTGER4 (Terada N. et al., 2010), while SRRM4 expression and loss or reduction of REST activity through altered splicing has also been correlated to the onset of neuroendrocrine phenotype in CRPC (Zhang X. et al., 2015). REST is a known repressor of neuronal gene expression in non-neuronal tissues, so its loss or reduction might precede upregulation of neuroendocrine genes.

[0094] In general, CRPC that are morphologically NE transformed (CRPC-NE) have a similar mutational landscape to those that retain an adenocarcinoma morphology (CRPC-Ad). CRPC-NE tumors can be distinguished from CRPC-Ad tumors in having lower AR protein expression despite fewer AR mutations, loss or reduction of RB1, mutation or loss or reduction of TP53, and loss or reduction of CYLD, hypermethylation and loss or reduction of SPDEF expression and higher EZH2 expression (Beltran H. et al., 2016). Evaluation of multiple biopsy samples from patients before and after development of CRPC-NE, and from patients who have two types of resistant tumors development, both CRPC-Ad with T790M EGFR mutations, and CRPC-NE, argue for a common adenocarcinoma precursor that gives rise to multiple clones due to the similar molecular genetics pointing towards divergent clonal evolution of metastatic CRPC (Beltran H. et al., 2016). There are strong epigenetic differences between CRPC-Ad and CRPC-NE tumors in the same patient, mainly with aberrant DNA methylation seen in CRPC-NE (Beltran H. et al., 2016), suggesting that transition to a NE state involves epigenetic dysregulation.

[0095] In addition to the association of androgen deprivation therapy and neuroendocrine differentiation, it has been shown that radiation therapy can also induce prostate cancer neuroendocrine differentiation, and patients treated with radiation therapy show elevated serum chromogranin A levels, indicating an increase in neuroendocrine cells in the tumor (Hu C. D. et al., 2015). This notion supports the idea that rare neuroendocrine cells are likely present in the original heterogeneous prostate adenocarcinoma, and upon therapies that can effectively eradicate the bulk of the tumor, rare neuroendocrine cells are resistant to these therapies and transform the nature of the tumor.

[0096] It has also been proposed that a large cell neuroendocrine phenotype is a transitional stage between conventional adenocarcinoma and small cell neuroendocrine carcinoma, but often tumor heterogeneity is seen and all three phenotypes are present in the same tumor (Aparicio A. et al., 2011; Epstein J. L. et al., 2014). About half of all prostate adenocarcinomas express ERG or another ETS gene family member, and ERG suppresses genes involved in neuroendocrine differentiation (Mounir Z. et al., 2015). Androgen deprivation therapy downregulates ERG and leads to a rapid increase in neuroendocrine cells in the tumor which are resistant to androgen deprivation therapy (Mounir Z. et al., 2015). Similarly, gene amplification of AR plays a role in CRPC development and possibly the differentiation into a neuroendocrine phenotype (Priemer D. S. et al., 2016).

[0097] Since CRPC rapidly leads to lethality, patients at risk transitioning to a neuroendocrine phenotype could benefit from treatment before full blown metastatic disease is detected. Novel strategies are needed to treat the neuroendocrine differentiated cells that arise following treatment with targeted therapies that do not eradicate the rare neuroendocrine cells that are present in tumors. These treatment strategies could involve adjunctive therapies that are combined with androgen deprivation to prevent and block CRPC development. Alternatively, salvage therapy after development of CRPC could be administered, but since disease progression is so rapid, preventing rather than treating metastatic disease is preferred.

[0098] As demonstrated in the Examples herein, DLL3 expression is increased in prostate adenocarcinoma that is resistant to androgen deprivation therapy and has transitioned to a neuroendocrine phenotype. The present invention provides that anti-DLL3 antibody drug conjugates may be used as an effective therapeutic treatment strategy for patients with prostate adenocarcinoma identified as at risk for the transitioning to a neuroendocrine phenotype, including those patients castration resistant prostate cancer, such as patients having received androgen deprivation therapy. These tumors at risk are often recurrent, refractory, relapsed or resistant.

[0099] C.3. Bladder Cancer

[0100] As described in the Examples provided herein, DLL3 positive cells are present in bladder adenocarcinoma samples. Small cell neuroendocrine tumors do arise in the bladder and are very aggressive, but perhaps due to the lack of targeted therapies, bladder TCC treated with standard chemotherapy has not been reported to transform into small cell neuroendocrine tumors. Concurrent adenocarcinoma with a neuroendocrine carcinoma has been described (Jiang Y 2014), so bladder carcinoma may be at risk for transitioning to a neuroendocrine phenotype due to tumor heterogeneity.

[0101] The present invention provides that anti-DLL3 antibody drug conjugates may be used as an effective therapeutic treatment strategy for patients with bladder adenocarcinoma identified as at risk for the transitioning to a neuroendocrine phenotype, including recurrent, refractory, relapsed or resistant bladder tumors.

[0102] C.4. Additional Adenocarcinomas

[0103] De novo small cell or neuroendocrine tumors arise at very low frequency in additional tissues including adrenal gland, breast, gall bladder, ovary, cervix, endometrium, kidney, pancreas, colon, stomach, and thyroid. Adenocarcinomas arise in cells with glandular structures from the lung, colon, pancreas, prostate, breast, esophagus, stomach, kidney, cervix, endometrium, and thyroid. For the majority of these adenocarcinomas, therapies targeted the specific oncogenic pathways that drive tumorigenesis have not yet been developed. Resistance to targeted therapies could arise through small cell transformation of these adenocarcinomas.

### III. DLL3 Physiology

[0104] It has been found that DLL3 phenotypic determinants are clinically associated with various proliferative disorders, including neoplasia exhibiting neuroendocrine features, and that DLL3 protein and variants or isoforms thereof provide useful tumor markers which may be exploited in the treatment of related diseases. In this regard the present invention provides a number of antibody drug conjugates comprising an anti-DLL3 antibody targeting agent and a payload (e.g., a payload comprising a PBD warhead). As discussed in more detail below, the disclosed anti-DLL3 ADCs are particularly effective at eliminating tumorigenic cells and therefore useful for the treatment and prophylaxis of certain proliferative disorders or the progression or recurrence thereof.

[0105] Moreover, it has been found that DLL3 markers or determinants such as cell surface DLL3 protein are therapeutically associated with cancer stem cells (also known as tumor perpetuating cells) and may be effectively exploited to eliminate or silence the same. The ability to selectively reduce or eliminate cancer stem cells through the use of anti-DLL3 conjugates as disclosed herein is surprising in that such cells are known to generally be resistant to many conventional treatments. That is, the effectiveness of traditional, as well as more recent targeted treatment methods, is often limited by the existence and/or emergence of resistant cancer stem cells that are capable of perpetuating tumor growth even in face of these diverse treatment methods. Further, determinants associated with cancer stem cells often make poor therapeutic targets due to low or inconsistent expression, failure to remain associated with the tumorigenic cell or failure to present at the cell surface. In sharp contrast to the teachings of the prior art, the instantly disclosed ADCs and methods effectively overcome this inherent resistance and to specifically eliminate, deplete, silence or promote the differentiation of such cancer stem cells thereby negating their ability to sustain or re-induce the underlying tumor growth.

[0106] Thus DLL3 conjugates such as those disclosed herein may advantageously be used in the treatment and/or prevention of selected proliferative (e.g., neoplastic) disorders or progression or recurrence thereof. It will be appreciated that, while preferred embodiments of the invention will be discussed extensively below, particularly in terms of particular domains, regions or epitopes or in the context of cancer stem cells or tumors comprising neuroendocrine features and their interactions with the disclosed antibody drug conjugates, those skilled in the art will appreciate that the scope of the instant invention is not limited by such exemplary embodiments. Rather, the most expansive embodiments of the present invention and the appended claims are broadly and expressly directed to the disclosed anti-DLL3 conjugates and their use in the treatment and/or prevention of a variety of DLL3 associated or mediated disorders, including neoplastic or cell proliferative disorders, regardless of any particular mechanism of action or specifically targeted tumor, cellular or molecular component.

[0107] The Notch signaling pathway, first identified in C. elegans and Drosophila and subsequently shown to be evolutionarily conserved from invertebrates to vertebrates, participates in a series of fundamental biological processes including normal embryonic development, adult tissue homeostasis, and stem cell maintenance (D'Souza et al., 2010; Liu et al., 2010). Notch signaling is critical for a variety of cell types during specification, patterning and morphogenesis. Frequently, this occurs through the mechanism of lateral inhibition, in which cells expressing Notch ligand(s) adopt a default cell fate, yet suppress this fate in adjacent cells via stimulation of Notch signaling (Sternberg, 1988; Cabrera 1990). This binary cell fate choice mediated by Notch signaling is found to play a role in numerous tissues, including the developing nervous system (de la Pompa et al., 1997), the hematopoietic and immune systems (Bigas and Espinosoa, 2012; Hoyne et al, 2011; Nagase et al., 2011), the gut (Fre et al., 2005; Fre et al., 2009), the endocrine pancreas (Apelqvist et al., 1999; Jensen et al., 2000), the pituitary (Raetzman et al., 2004), and the diffuse neuroendocrine system (Ito et al., 2000; Schonhoff et al, 2004). A generalized mechanism for implementing this binary switch appears conserved despite the wide range of developmental systems in which Notch plays a role—in cells where the default cell fate choice is determined by transcriptional regulators known as basic helix-loop-helix (bHLH) proteins, Notch signaling leads to activation of a class of Notch responsive genes, which in turn suppress the activity of the bHLH proteins (Ball, 2004). These binary decisions take place in the wider context of developmental and signaling cues that permit Notch signaling to effect proliferation or inhibit it, and to trigger self-renewal or inhibit it.

[0108] In Drosophila, Notch signaling is mediated primarily by one Notch receptor gene and two ligand genes, known as Serrate and Delta (Wharton et al, 1985; Rebay et al., 1991). In humans, there are four known Notch receptors and five DSL (Delta-Serrate LAG2) ligands—two homologs of Serrate, known as Jagged1 and Jagged 2, and three homologs of Delta, termed delta-like ligands or DLL1, DLL3 and DLL4. In general, Notch receptors on the surface of the signal-receiving cell are activated by interactions with ligands expressed on the surface of an opposing, signal-sending cell (termed a trans-interaction). These trans-interactions lead to a sequence of protease mediated cleavages of the Notch receptor. In consequence, the Notch receptor intracellular domain is free to translocate from the membrane to the nucleus, where it partners with the CSL family of transcription factors (RBPJ in humans) and converts them from transcriptional repressors into activators of Notch responsive genes.

[0109] Of the human Notch ligands, DLL3 is different in that it seems incapable of activating the Notch receptor via trans-interactions (Ladi et al., 2005). Notch ligands may also interact with Notch receptors in cis (on the same cell) leading to inhibition of the Notch signal, although the exact mechanisms of cis-inhibition remain unclear and may vary depending upon the ligand (for instance, see Klein et al., 1997; Ladi et al., 2005; Glittenberg et al., 2006). Two hypothesized modes of inhibition include modulating Notch signaling at the cell surface by preventing trans-interactions, or by reducing the amount of Notch receptor on the surface of the cell by perturbing the processing of the receptor or by physically causing retention of the receptor in the endoplasmic reticulum or Golgi (Sakamoto et al., 2002; Dunwoodie, 2009). It is clear, however, that stochastic differences in expression of Notch receptors and ligands on neighboring cells can be amplified through both transcriptional and non-transcriptional processes, and subtle balances of cis- and trans-interactions can result in a fine tuning of the Notch mediated delineation of divergent cell fates in neighboring tissues (Sprinzak et al., 2010).

[0110] DLL3 (also known as Delta-like 3 or SCDO1) is a member of the Delta-like family of Notch DSL ligands. Representative DLL3 protein orthologs include, but are not limited to, human (GenBank Accession Nos. NP_058637 and NP_982353), chimpanzee (GenBank Accession No. XP_003316395), mouse (GenBank Accession No. NP_031892), and rat (GenBank Accession No. NP_446118). In humans, the DLL3 gene consists of 8 exons spanning 9.5 kBp located on chromosome 19q13. Alternate splicing within the last exon gives rise to two processed transcripts, one of 2389 bases (GenBank Accession No. NM_016941) and one of 2052 bases (GenBank Accession No. NM_203486). The former transcript encodes a 618 amino acid protein (GenBank Accession No. NP_058637; SEQ ID NO: 1), whereas the latter encodes a 587 amino acid protein (GenBank Accession No. NP_982353; SEQ ID NO: 2). These two protein isoforms of DLL3 share overall 100% identity across their extracellular domains and their transmembrane domains, differing only in that the longer isoform contains an extended cytoplasmic tail containing 32 additional residues at the carboxy terminus of the protein. The biological relevance of the isoforms is unclear, although both isoforms can be detected in tumor cells. In general, DSL ligands are composed of a series of structural domains: a unique N-terminal domain, followed by a conserved DSL domain, multiple tandem epidermal growth factor (EGF)-like repeats, a transmembrane domain, and a cytoplasmic domain not highly conserved across ligands but one which contains multiple lysine residues that are potential sites for ubiquitination by unique E3 ubiquitin ligases. The DSL domain is a degenerate EGF-domain that is necessary but not sufficient for interactions with Notch receptors (Shimizu et al., 1999). Additionally, the first two EGF-like repeats of most DSL ligands contain a smaller protein sequence motif known as a DOS domain that co-operatively interacts with the DSL domain when activating Notch signaling.

[0111] The extracellular region of the DLL3 protein comprises six EGF-like domains, a single DSL domain and an N-terminal domain. Generally, the EGF domains are recognized as occurring at about amino acid residues 216-249 (domain 1), 274-310 (domain 2), 312-351 (domain 3), 353-389 (domain 4), 391-427 (domain 5) and 429-465 (domain 6), with the DSL domain at about amino acid residues 176-215 and the N-terminal domain at about amino acid residues 27-175 of hDLL3 (SEQ ID NOS: 1 and 2). Each of the EGF-like domains, the DSL domain and the N-terminal domain comprise part of the DLL3 protein as defined by a distinct amino acid sequence. Note that, for the purposes of the instant disclosure the respective EGF-like domains may be termed EGF1 to EGF6 with EGF1 being closest to the N-terminal portion of the protein. In regard to the structural composition of the protein one significant aspect of the instant invention is that the disclosed DLL3 modulators may be generated, fabricated, engineered or selected so as to react with a selected domain, motif or epitope. In certain cases such site specific modulators may provide enhanced reactivity and/or efficacy depending on their primary mode of action. In particularly preferred embodiments the anti-DLL3 ADCs will bind to the DSL domain and, in even more preferred embodiments, will bind to an epitope comprising G203, R205, P206 (SEQ ID NO: 4) within the DSL domain.

[0112] Note that, as used herein the terms “mature protein” or “mature polypeptide” as used herein refers to the form(s) of the protein produced by expression in a mammalian cell. It is generally hypothesized that once export of a growing protein chain across the rough endoplasmic reticulum has been initiated, proteins secreted by mammalian cells have a signal peptide (SP) sequence which is cleaved from the complete polypeptide to produce a “mature” form of the protein. In both isoforms of DLL3 the mature protein comprises a signal peptide of 26 amino acids that may be clipped prior to cell surface expression. Thus, in mature proteins the N-terminal domain will extend from position 27 in the protein until the beginning of the DSL domain. Of course, if the protein is not processed in this manner the N-terminal domain would be held to extend to position one of SEQ ID NOS: 3 & 4.

[0113] Of the various Delta-like ligands, DLL3 is the most divergent from the others in the family, since it contains a degenerate DSL domain, no DOS motifs, and an intracellular domain which lacks lysine residues. The degenerate DSL and lack of DOS motifs are consistent with the inability of DLL3 to trigger Notch signaling in trans (between cells), suggesting that DLL3, unlike DLL1 or DLL4, acts only as an inhibitor of Notch signaling (Ladi et al., 2005). Studies have shown that DLL3 may be resident primarily in the cis-Golgi (Geffers et al., 2007), which would be consistent with a hypothesized ability to retain Notch receptor intracellularly, or to interfere with processing of Notch receptors, preventing export to the cell surface and instead retargeting it to the lysosome (Chapman et al., 2011). Some DLL3 protein may appear at the cell surface, however, when the protein is artificially overexpressed in model systems (Ladi et al., 2005), but it is not obvious that this would be the case in normal biological contexts nor in tumors in which the DLL3 mRNA transcript is elevated; somewhat surprisingly, the protein levels detected in tumor types indicate significant DLL3 protein is escaping to the cell surface of various tumors.

[0114] Defects in the DLL3 gene have been linked to spondylocostal dysostosis in humans, a severe congenital birth defect resulting in abnormal vertebrae formation and rib abnormalities (Dunwoodie, 2009). This is linked to alterations in Notch signaling, known to play a crucial role in determining the polarity and patterning of somites, the embryonic precursors to the vertebrae that require a finely regulated oscillating interplay between Notch, Wnt, and FGF signaling pathways for proper development (Kageyama et al., 2007; Goldbeter and Pourquie, 2008). Although DLL1 and DLL3 are typically expressed in similar locations within the developing mouse embryo, experiments with transgenic mice have demonstrated that DLL3 does not compensate for DLL1 (Geffers et al., 2007). DLL1 knock-out mice are embryonic lethal, but DLL3 mutant mice do survive yet show a phenotype similar to that found in humans with spondylocostal dysostosis (Kusumi et al., 1998; Shinkai et al., 2004). These results data are consistent with a subtle interplay of Notch trans- and cis-interactions crucial for normal development.

[0115] Further, as discussed above Notch signaling plays a role in the development and maintenance of neuroendocrine cells and tumors exhibiting neuroendocrine features. In this regard Notch signaling is involved in a wide range of cell fate decisions in normal endocrine organs and in the diffuse neuroendocrine system. For instance, in the pancreas, Notch signaling is required to suppress the development of a default endocrine phenotype mediated by the bHLH transcription factor NGN3 (Habener et al, 2005). Similar Notch mediated suppression of endocrine cell fates occurs in enteroendocrine cells (Schonhoff et al., 2004), thyroid parafollicular cells (Cook et al., 2010), in specifying the relative ratios of neuroendocrine cell types in the pituitary (Dutta et al., 2011), and is likely involved in decisions of cells within the lungs to adopt a neuroendocrine or non-neuroendocrine phenotype (Chen et al., 1997; Ito et al., 2000; Sriuranpong et al., 2002). Hence it is clear that in many tissues, suppression of Notch signaling is linked to neuroendocrine phenotypes.

[0116] Inappropriate reactivation of developmental signaling pathways or disregulation of normal signaling pathways are commonly observed in tumors, and in the case of Notch signaling, have been associated with numerous tumor types (Koch and Radtke, 2010; Harris et al., 2012). The Notch pathway has been studied as an oncogene in lymphomas, colorectal, pancreatic, and some types of non-small cell lung cancer (see Zarenczan and Chen, 2010 and references therein). In contrast, Notch is reported to act as a tumor suppressor in tumors with neuroendocrine features (see Zarenczan and Chen, 2010 supra). Tumors with neuroendocrine features arise infrequently in a wide range of primary sites, and while their exhaustive classification remains problematic (Yao et al., 2008; Klimstra et al., 2010; Köppel, 2011), they may be classified into four major types: low grade benign carcinoids, low-grade well-differentiated neuroendocrine tumors with malignant behavior, tumors with mixed neuroendocrine and epithelial features, and high-grade poorly differentiated neuroendocrine carcinomas. Of these classifications, the poorly differentiated neuroendocrine carcinomas, which include small cell lung cancer (SCLC) and subsets of non-small cell lung cancer (NSCLC), are cancer types with dismal prognoses. It has been postulated that SCLC is bronchogenic in origin, arising in part from pulmonary neuroendocrine cells (Galluzzo and Bocchetta, 2011). Whatever the specific cellular source of origin for each of these tumors possessing a neuroendocrine phenotype, it may be expected that suppression of Notch signaling, either by direct lesions in the Notch pathway genes themselves, or by activation of other genes that suppress Notch signaling, may lead to the acquisition of the neuroendocrine phenotype of these tumors. By extension, the genes that lead to the perturbation of the Notch pathway may afford therapeutic targets for the treatment of tumors with neuroendocrine phenotypes, particularly for indications that currently have poor clinical outcomes.

[0117] ASCL1 is one such gene that appears to interact with Notch signaling pathway via DLL3. ASCL1 (achaete-scute homolog 1) is a member of the basic helix-loop-helix family of transcription factors and controls transcription by binding to DNA consensus sequences termed E-boxes (5′-CANNTG-3′).

[0118] Representative ASCL1 protein orthologs include, but are not limited to, human (GenBank Accession No. NP_004307), chimpanzee (GenBank Accession No. XP_009424458), cynomolgus monkey (GenBank Accession No. XP_005572101), rat (GenBank Accession No. NP_032579) and mouse (GenBank Accession No. NP_032579). In humans, the ASCL1 gene consists of 2 exons spanning approximately 3 kBp at chromosome 12q23.2. Transcription of the human ASCL1 locus yields a 2490 nucleotide transcript (GenBank Accession No. NM_004316) that encodes a 236 amino acid protein (GenBank Accession No. NP_004307). No alternative spliced transcripts or variant proteins have been reported.

[0119] It is clear that many neuroendocrine tumors show a poorly differentiated (i.e. partially complete) endocrine phenotype; for instance, marked elevation or expression of various endocrine proteins and polypeptides (e.g. chromogranin A, CHGA; calcitonin, CALCA; propiomelanocorin, POMC; somatostatin, SST), proteins associated with secretory vesicles (e.g., synaptophysin, SYP), and genes involved in the biochemical pathways responsible for the synthesis of bioactive amines (e.g., dopa decarboxylase, DDC). Perhaps not surprisingly, these tumors frequently over-express ASCL1 (also known as mASH1 in mice, or hASH1 in humans), a transcription factor known to play a role in orchestrating gene cascades leading to neural and neuroendocrine phenotypes. Although the specific molecular details of the cascade remain ill-defined, it is increasingly clear that for certain cell types, particularly thyroid parafollicular cells (Kameda et al., 2007), chromaffin cells of the adrenal medulla (Huber et al., 2002) and cells found in the diffuse neuroendocrine system of the lung (Chen et al., 1997; Ito et al., 2000; Sriuranpong et al., 2002), ASCL1 is part of a finely tuned developmental regulatory loop in which cell fate choices are mediated by the balance of ASCL1-mediated and Notch-mediated gene expression cascades. For instance, ASCL1 was found in to be expressed in normal mouse pulmonary neuroendocrine cells, while the Notch signaling effector HES1, was expressed in pulmonary non-neuroendocrine cells (Ito et al., 2000). That these two cascades are in a fine balance with potential cross-regulation is increasingly appreciated. The Notch effector HES1 has been shown to downregulate ASCL1 expression (Chen et al., 1997; Sriuranpong et al., 2002). These results clearly demonstrate that Notch signaling can suppress neuroendocrine differentiation. However, demonstration that ASCL1 binding to the DLL3 promoter activates DLL3 expression (Henke et al., 2009) and the observation that DLL3 attenuates Notch signaling (Ladi et al., 2005) closes the genetic circuit for cell fate choices between neuroendocrine and non-neuroendocrine phenotypes.

[0120] Given that Notch signaling appears to have evolved to amplify subtle differences between neighboring cells to permit sharply bounded tissue domains with divergent differentiation paths (e.g., “lateral inhibition,” as described above), these data together suggest that a finely tuned developmental regulatory loop has become reactivated and disregulated in cancers with neuroendocrine phenotypes. While it is not obvious that DLL3 would provide a suitable cell surface target for the development of antibody therapeutics given its normal residence within interior membranous compartments of the cell (Geffers et al., 2007) and its presumed interactions with Notch therein, it is possible that the resultant elevation of DLL3 expression in neuroendocrine tumors may offer a unique therapeutic target for tumors with the neuroendocrine phenotype (e.g., NETs and pNETs). It is commonly observed that vast overexpression of proteins in laboratory systems may cause mislocalization of the overexpressed protein within the cell. Therefore it is a reasonable hypothesis, yet not obvious without experimental verification, that overexpression of DLL3 in tumors may lead to some cell surface expression of the protein, and thereby present a target for the development of antibody therapeutics.

### IV. Antibodies

[0121] A. Antibody Structure

[0122] Antibodies and variants and derivatives thereof, including accepted nomenclature and numbering systems, have been extensively described, for example, in Abbas et al. (2010), Cellular and Molecular Immunology (6^{th} Ed.), W.B. Saunders Company; or Murphey et al. (2011), Janeway's Immunobiology (8^{th} Ed.), Garland Science.

[0123] An “antibody” or “intact antibody” typically refers to a Y-shaped tetrameric protein comprising two heavy (H) and two light (L) polypeptide chains held together by covalent disulfide bonds and non-covalent interactions. Each light chain is composed of one variable domain (VL) and one constant domain (CL). Each heavy chain comprises one variable domain (VH) and a constant region, which in the case of IgG, IgA, and IgD antibodies, comprises three domains termed CH1, CH2, and CH3 (IgM and IgE have a fourth domain, CH4). In IgG, IgA, and IgD classes the CH1 and CH2 domains are separated by a flexible hinge region, which is a proline and cysteine rich segment of variable length (from about 10 to about 60 amino acids in various IgG subclasses). The variable domains in both the light and heavy chains are joined to the constant domains by a “J” region of about 12 or more amino acids and the heavy chain also has a “D” region of about 10 additional amino acids. Each class of antibody further comprises inter-chain and intra-chain disulfide bonds formed by paired cysteine residues.

[0124] As used herein the term “antibody” includes polyclonal antibodies, multiclonal antibodies, monoclonal antibodies, chimeric antibodies, humanized and primatized antibodies, CDR grafted antibodies, human antibodies, recombinantly produced antibodies, intrabodies, multispecific antibodies, bispecific antibodies, monovalent antibodies, multivalent antibodies, anti-idiotypic antibodies, synthetic antibodies, including muteins and variants thereof, immunospecific antibody fragments such as Fd, Fab, F(ab′)₂, F(ab′) fragments, single-chain fragments (e.g. ScFv and ScFvFc); and derivatives thereof including Fc fusions and other modifications, and any other immunoreactive molecule so long as it exhibits preferential association or binding with a determinant. Moreover, unless dictated otherwise by contextual constraints the term further comprises all classes of antibodies (i.e. IgA, IgD, IgE, IgG, and IgM) and all subclasses (i.e., IgG1, IgG2, IgG3, IgG4, IgA1, and IgA2). Heavy-chain constant domains that correspond to the different classes of antibodies are typically denoted by the corresponding lower case Greek letter α, δ, ε, γ, and μ, respectively. Light chains of the antibodies from any vertebrate species can be assigned to one of two clearly distinct types, called kappa (κ) and lambda (λ), based on the amino acid sequences of their constant domains.

[0125] The variable domains of antibodies show considerable variation in amino acid composition from one antibody to another and are primarily responsible for antigen recognition and binding. Variable regions of each light/heavy chain pair form the antibody binding site such that an intact IgG antibody has two binding sites (i.e. it is bivalent). VH and VL domains comprise three regions of extreme variability, which are termed hypervariable regions, or more commonly, complementarity-determining regions (CDRs), framed and separated by four less variable regions known as framework regions (FRs). The non-covalent association between the VH and the VL region forms the Fv fragment (for “fragment variable”) which contains one of the two antigen-binding sites of the antibody. ScFv fragments (for single chain fragment variable), which can be obtained by genetic engineering, associates in a single polypeptide chain, the VH and the VL region of an antibody, separated by a peptide linker.

[0126] As used herein, the assignment of amino acids to each domain, framework region and CDR may be in accordance with one of the schemes provided by Kabat et al. (1991) Sequences of Proteins of Immunological Interest (5^{th} Ed.), US Dept. of Health and Human Services, PHS, NIH, NIH Publication no. 91-3242; Chothia et al., 1987, PMID: 3681981; Chothia et al., 1989, PMID: 2687698; MacCallum et al., 1996, PMID: 8876650; or Dubel, Ed. (2007) Handbook of Therapeutic Antibodies, 3^{rd} Ed., Wily-VCH Verlag GmbH and Co or AbM (Oxford Molecular/MSI Pharmacopia) unless otherwise noted. As is well known in the art variable region residue numbering is typically as set forth in Chothia or Kabat. Amino acid residues which comprise CDRs as defined by Kabat, Chothia, MacCallum (also known as Contact) and AbM as obtained from the Abysis website database (infra.) are set out below. Note that MacCallum uses the Chothia numbering system.

TABLE 1

| | Kabat | Chothia | MacCallum | AbM |
|---|---|---|---|---|
| VH CDR1 | 31-35 | 26-32 | 30-35 | 26-35 |
| VH CDR2 | 50-65 | 52-56 | 47-58 | 50-58 |
| VH CDR3 | 95-102 | 95-102 | 93-101 | 95-102 |
| VL CDR1 | 24-34 | 24-34 | 30-36 | 24-34 |
| VL CDR2 | 50-56 | 50-56 | 46-55 | 50-56 |
| VL CDR3 | 89-97 | 89-97 | 89-96 | 89-97 |

[0127] Variable regions and CDRs in an antibody sequence can be identified according to general rules that have been developed in the art (as set out above, such as, for example, the Kabat nomenclature system) or by aligning the sequences against a database of known variable regions. Methods for identifying these regions are described in Kontermann and Dubel, eds., Antibody Engineering, Springer, New York, N.Y., 2001 and Dinarello et al., Current Protocols in Immunology, John Wiley and Sons Inc., Hoboken, N.J., 2000. Exemplary databases of antibody sequences are described in, and can be accessed through, the “Abysis” website at www.bioinf.org.uk/abs (maintained by A. C. Martin in the Department of Biochemistry & Molecular Biology University College London, London, England) and the VBASE2 website at www.vbase2.org, as described in Retter et al., Nucl. Acids Res., 33 (Database issue): D671-D674 (2005).

[0128] Preferably the sequences are analyzed using the Abysis database, which integrates sequence data from Kabat, IMGT and the Protein Data Bank (PDB) with structural data from the PDB. See Dr. Andrew C. R. Martin's book chapter Protein Sequence and Structure Analysis of Antibody Variable Domains. In: Antibody Engineering Lab Manual (Ed.: Duebel, S. and Kontermann, R., Springer-Verlag, Heidelberg, ISBN-13: 978-3540413547, also available on the website bioinforg.uk/abs). The Abysis database website further includes general rules that have been developed for identifying CDRs which can be used in accordance with the teachings herein. Unless otherwise indicated, all CDRs set forth herein are derived according to the Abysis database website as per Kabat et al.

[0129] For heavy chain constant region amino acid positions discussed in the invention, numbering is according to the Eu index first described in Edelman et al. 1969, Proc. Natl. Acad. Sci. USA 63(1): 78-85 describing the amino acid sequence of the myeloma protein Eu, which reportedly was the first human IgG1 sequenced. The Eu index of Edelman is also set forth in Kabat et al., 1991 (supra.). Thus, the terms “Eu index as set forth in Kabat” or “Eu index of Kabat” or “Eu index” or “Eu numbering” in the context of the heavy chain refers to the residue numbering system based on the human IgG1 Eu antibody of Edelman et al. as set forth in Kabat et al., 1991 (supra.) The numbering system used for the light chain constant region amino acid sequence is similarly set forth in Kabat et al., (supra.). An exemplary kappa light chain constant region amino acid sequence compatible with the present invention is set forth immediately below:

(SEQ ID NO: 5)
RTVAAPSVFIFPPSDEQLKSGTASVVCLLNNFYPREAKVQWKVDNALQSG
NSQESVTEQDSKDSTYSLSSTLTLSKADYEKHKVYACEVTHQGLSSPVTK
SFNRGEC.

[0130] Similarly, an exemplary IgG1 heavy chain constant region amino acid sequence compatible with the present invention is set forth immediately below:

(SEQ ID NO: 6)
ASTKGPSVFPLAPSSKSTSGGTAALGCLVKDYFPEPVTVSWNSGALTSGV
HTFPAVLQSSGLYSLSSVVTVPSSSLGTQTYICNVNHKPSNTKVDKKVEP
KSCDKTHTCPPCPAPELLGGPSVFLFPPKPKDTLMISRTPEVTCVVVDVS
HEDPEVKFNWYVDGVEVHNAKTKPREEQYNSTYRVVSVLTVLHQDWLNGK
EYKCKVSNKALPAPIEKTISKAKGQPREPQVYTLPPSRDELTKNQVSLTC
LVKGFYPSDIAVEWESNGQPENNYKTTPPVLDSDGSFFLYSKLTVDKSRW
QQGNVFSCSVMHEALHNHYTQKSLSLSPG.

[0131] The disclosed constant region sequences, or variations or derivatives thereof, may be operably associated with the disclosed heavy and light chain variable regions using standard molecular biology techniques to provide full-length antibodies that may be used as such or incorporated in the ADCs of the invention.

[0132] There are two types of disulfide bridges or bonds in immunoglobulin molecules: interchain and intrachain disulfide bonds. As is well known in the art the location and number of interchain disulfide bonds vary according to the immunoglobulin class and species. While the invention is not limited to any particular class or subclass of antibody, the IgG1 immunoglobulin shall be used throughout the instant disclosure for illustrative purposes. In wild-type IgG1 molecules there are twelve intrachain disulfide bonds (four on each heavy chain and two on each light chain) and four interchain disulfide bonds. Intrachain disulfide bonds are generally somewhat protected and relatively less susceptible to reduction than interchain bonds. Conversely, interchain disulfide bonds are located on the surface of the immunoglobulin, are accessible to solvent and are usually relatively easy to reduce. Two interchain disulfide bonds exist between the heavy chains and one from each heavy chain to its respective light chain. It has been demonstrated that interchain disulfide bonds are not essential for chain association. The IgG1 hinge region contain the cysteines in the heavy chain that form the interchain disulfide bonds, which provide structural support along with the flexibility that facilitates Fab movement. The heavy/heavy IgG1 interchain disulfide bonds are located at residues C226 and C229 (Eu numbering) while the IgG1 interchain disulfide bond between the light and heavy chain of IgG1 (heavy/light) are formed between C214 of the kappa or lambda light chain and C220 in the upper hinge region of the heavy chain.

[0133] B. Antibody Generation and Production

[0134] Antibodies of the invention can be produced using a variety of methods known in the art.

[0135] 1. Generation of Polyclonal Antibodies in Host Animals

[0136] The production of polyclonal antibodies in various host animals is well known in the art (see for example, Harlow and Lane (Eds.) (1988) Antibodies: A Laboratory Manual, CSH Press; and Harlow et al. (1989) Antibodies, NY, Cold Spring Harbor Press). In order to generate polyclonal antibodies, an immunocompetent animal (e.g., mouse, rat, rabbit, goat, non-human primate, etc.) is immunized with an antigenic protein or cells or preparations comprising an antigenic protein. After a period of time, polyclonal antibody-containing serum is obtained by bleeding or sacrificing the animal. The serum may be used in the form obtained from the animal or the antibodies may be partially or fully purified to provide immunoglobulin fractions or isolated antibody preparations.

[0137] In this regard antibodies of the invention may be generated from any DLL3 or ASCL1 determinant that induces an immune response in an immunocompetent animal. As used herein “determinant” or “target” means any detectable trait, property, marker or factor that is identifiably associated with, or specifically found in or on a particular cell, cell population or tissue. Determinants or targets may be morphological, functional or biochemical in nature and are preferably phenotypic. In preferred embodiments a determinant is a protein that is differentially expressed (over- or under-expressed) by specific cell types or by cells under certain conditions (e.g., during specific points of the cell cycle or cells in a particular niche). For the purposes of the instant invention a determinant preferably is differentially expressed on aberrant cancer cells and may comprise a DLL3 protein, or any of its splice variants, isoforms, homologs or family members, or specific domains, regions or epitopes thereof. An “antigen”, “immunogenic determinant”, “antigenic determinant” or “immunogen” means any DLL3 or ASCL1 protein or any fragment, region or domain thereof that can stimulate an immune response when introduced into an immunocompetent animal and is recognized by the antibodies produced by the immune response. The presence or absence of the determinants contemplated herein may be used to identify a cell, cell subpopulation or tissue (e.g., tumors, tumorigenic cells or CSCs).

[0138] Any form of antigen, or cells or preparations containing the antigen, can be used to generate an antibody that is specific for the DLL3 determinant. As set forth herein the term “antigen” is used in a broad sense and may comprise any immunogenic fragment or determinant of the selected target including a single epitope, multiple epitopes, single or multiple domains or the entire extracellular domain (ECD) or protein. The antigen may be an isolated full-length protein, a cell surface protein (e.g., immunizing with cells expressing at least a portion of the antigen on their surface), or a soluble protein (e.g., immunizing with only the ECD portion of the protein) or protein construct (e.g., Fc-antigen). The antigen may be produced in a genetically modified cell. Any of the aforementioned antigens may be used alone or in combination with one or more immunogenicity enhancing adjuvants known in the art. DNA encoding the antigen may be genomic or non-genomic (e.g., cDNA) and may encode at least a portion of the ECD, sufficient to elicit an immunogenic response. Any vectors may be employed to transform the cells in which the antigen is expressed, including but not limited to adenoviral vectors, lentiviral vectors, plasmids, and non-viral vectors, such as cationic lipids.

[0139] 2. Monoclonal Antibodies

[0140] In selected embodiments, the invention contemplates use of monoclonal antibodies. As known in the art, the term “monoclonal antibody” or “mAb” refers to an antibody obtained from a population of substantially homogeneous antibodies, i.e., the individual antibodies comprising the population are identical except for possible mutations (e.g., naturally occurring mutations), that may be present in minor amounts.

[0141] Monoclonal antibodies can be prepared using a wide variety of techniques known in the art including hybridoma techniques, recombinant techniques, phage display technologies, transgenic animals (e.g., a XenoMouse®) or some combination thereof. For example, monoclonal antibodies can be produced using hybridoma and biochemical and genetic engineering techniques such as described in more detail in An, Zhigiang (ed.) Therapeutic Monoclonal Antibodies. From Bench to Clinic, John Wiley and Sons, 1^{st} ed. 2009; Shire et. al. (eds.) Current Trends in Monoclonal Antibody Development and Manufacturing, Springer Science+Business Media LLC, 1^{st} ed. 2010; Harlow et al., Antibodies: A Laboratory Manual, Cold Spring Harbor Laboratory Press, 2nd ed. 1988; Hammerling, et al., in: Monoclonal Antibodies and T-Cell Hybridomas 563-681 (Elsevier, N.Y., 1981). Following production of multiple monoclonal antibodies that bind specifically to a determinant, particularly effective antibodies may be selected through various screening processes, based on, for example, its affinity for the determinant or rate of internalization. Antibodies produced as described herein may be used as “source” antibodies and further modified to, for example, improve affinity for the target, improve its production in cell culture, reduce immunogenicity in vivo, create multispecific constructs, etc. A more detailed description of monoclonal antibody production and screening is set out below and in the appended Examples.

[0142] 3. Human Antibodies

[0143] In another embodiment, the antibodies may comprise fully human antibodies. The term “human antibody” refers to an antibody which possesses an amino acid sequence that corresponds to that of an antibody produced by a human and/or has been made using any of the techniques for making human antibodies described below.

[0144] Human antibodies can be produced using various techniques known in the art. One technique is phage display in which a library of (preferably human) antibodies is synthesized on phages, the library is screened with the antigen of interest or an antibody-binding portion thereof, and the phage that binds the antigen is isolated, from which one may obtain the immunoreactive fragments. Methods for preparing and screening such libraries are well known in the art and kits for generating phage display libraries are commercially available (e.g., the Pharmacia Recombinant Phage Antibody System, catalog no. 27-9400-01; and the Stratagene SurfZAP™ phage display kit, catalog no. 240612). There also are other methods and reagents that can be used in generating and screening antibody display libraries (see, e.g., U.S. Pat. No. 5,223,409; PCT Publication Nos. WO 92/18619, WO 91/17271, WO 92/20791, WO 92/15679, WO 93/01288, WO 92/01047, WO 92/09690; and Barbas et al., Proc. Natl. Acad. Sci. USA 88:7978-7982 (1991)).

[0145] In one embodiment, recombinant human antibodies may be isolated by screening a recombinant combinatorial antibody library prepared as above. In one embodiment, the library is a scFv phage display library, generated using human VL and VH cDNAs prepared from mRNA isolated from B-cells.

[0146] The antibodies produced by naive libraries (either natural or synthetic) can be of moderate affinity (Kₐ of about 10⁶ to 10⁷ M⁻¹), but affinity maturation can also be mimicked in vitro by constructing and reselecting from secondary libraries as described in the art. For example, mutation can be introduced at random in vitro by using error-prone polymerase (reported in Leung et al., Technique, 1: 11-15 (1989)). Additionally, affinity maturation can be performed by randomly mutating one or more CDRs, e.g. using PCR with primers carrying random sequence spanning the CDR of interest, in selected individual Fv clones and screening for higher-affinity clones. WO 9607754 described a method for inducing mutagenesis in a CDR of an immunoglobulin light chain to create a library of light chain genes. Another effective approach is to recombine the VH or VL domains selected by phage display with repertoires of naturally occurring V domain variants obtained from unimmunized donors and to screen for higher affinity in several rounds of chain reshuffling as described in Marks et al., Biotechnol., 10: 779-783 (1992). This technique allows the production of antibodies and antibody fragments with a dissociation constant K_{D} (k_{off}/kₒₙ) of about 10⁻⁹ M or less.

[0147] In other embodiments, similar procedures may be employed using libraries comprising eukaryotic cells (e.g., yeast) that express binding pairs on their surface. See, for example, U.S. Pat. No. 7,700,302 and U.S. Ser. No. 12/404,059. In one embodiment, the human antibody is selected from a phage library, where that phage library expresses human antibodies (Vaughan et al. Nature Biotechnology 14:309-314 (1996): Sheets et al. Proc. Natl. Acad. Sci. USA 95:6157-6162 (1998). In other embodiments, human binding pairs may be isolated from combinatorial antibody libraries generated in eukaryotic cells such as yeast. See e.g., U.S. Pat. No. 7,700,302. Such techniques advantageously allow for the screening of large numbers of candidate modulators and provide for relatively easy manipulation of candidate sequences (e.g., by affinity maturation or recombinant shuffling).

[0148] Human antibodies can also be made by introducing human immunoglobulin loci into transgenic animals, e.g., mice in which the endogenous immunoglobulin genes have been partially or completely inactivated and human immunoglobulin genes have been introduced. Upon challenge, human antibody production is observed, which closely resembles that seen in humans in all respects, including gene rearrangement, assembly, and antibody repertoire. This approach is described, for example, in U.S. Pat. Nos. 5,545,807; 5,545,806; 5,569,825; 5,625,126; 5,633,425; 5,661,016, and 6,075,181 and 6,150,584 regarding XenoMouse® technology; and Lonberg and Huszar, Intern. Rev. Immunol. 13:65-93 (1995). Alternatively, the human antibody may be prepared via immortalization of human B lymphocytes producing an antibody directed against a target antigen (such B lymphocytes may be recovered from an individual suffering from a neoplastic disorder or may have been immunized in vitro). See, e.g., Cole et al., Monoclonal Antibodies and Cancer Therapy, Alan R. Liss, p. 77 (1985); Boerner et al., J Immunol, 147 (1):86-95 (1991); and U.S. Pat. No. 5,750,373.

[0149] Whatever the source it will be appreciated that the human antibody sequence may be fabricated using art-known molecular engineering techniques and introduced into expression systems and host cells as described herein. Such non-natural recombinantly produced human antibodies (and subject compositions) are entirely compatible with the teachings of this disclosure and are expressly held to be within the scope of the instant invention. In certain select aspects ADCs of the invention will comprise a recombinantly produced human antibody acting as a cell binding agent.

[0150] 4. Derived Antibodies

[0151] Once source antibodies have been generated, selected and isolated as described above they may be further altered to provide anti-DLL3 or anti-ASCL1 antibodies having improved pharmaceutical characteristics. Preferably the source antibodies are modified or altered using known molecular engineering techniques to provide derived antibodies having the desired therapeutic properties.

[0152] 4.1. Chimeric and Humanized Antibodies

[0153] Selected embodiments of the invention comprise murine monoclonal antibodies that immunospecifically bind to DLL3 or immunospecifically bind to ASCL1 and which can be considered “source” antibodies. In selected embodiments, antibodies of the invention can be derived from such “source” antibodies through optional modification of the constant region and/or the epitope-binding amino acid sequences of the source antibody. In certain embodiments an antibody is “derived” from a source antibody if selected amino acids in the source antibody are altered through deletion, mutation, substitution, integration or combination. In another embodiment, a “derived” antibody is one in which fragments of the source antibody (e.g., one or more CDRs or the entire heavy and light chain variable regions) are combined with or incorporated into an acceptor antibody sequence to provide the derivative antibody (e.g. chimeric or humanized antibodies). These “derived” antibodies can be generated using standard molecular biological techniques as described below, such as, for example, to improve affinity for the determinant; to improve antibody stability; to improve production and yield in cell culture; to reduce immunogenicity in vivo; to reduce toxicity; to facilitate conjugation of an active moiety; or to create a multispecific antibody. Such antibodies may also be derived from source antibodies through modification of the mature molecule (e.g., glycosylation patterns or pegylation) by chemical means or post-translational modification.

[0154] In one embodiment, the antibodies of the invention comprise chimeric antibodies that are derived from protein segments from at least two different species or class of antibodies that have been covalently joined. The term “chimeric” antibody is directed to constructs in which a portion of the heavy and/or light chain is identical or homologous to corresponding sequences in antibodies from a particular species or belonging to a particular antibody class or subclass, while the remainder of the chain(s) is identical or homologous to corresponding sequences in antibodies from another species or belonging to another antibody class or subclass, as well as fragments of such antibodies (U.S. Pat. No. 4,816,567; Morrison et al., 1984, PMID: 6436822). In some embodiments chimeric antibodies of the instant invention may comprise all or most of the selected murine heavy and light chain variable regions operably linked to human light and heavy chain constant regions. In other selected embodiments, anti-DLL3 or anti-ASCL1 antibodies may be “derived” from the mouse antibodies disclosed herein.

[0155] In other embodiments, chimeric antibodies of the invention are “CDR-grafted” antibodies, where the CDRs (as defined using Kabat, Chothia, McCallum, etc.) are derived from a particular species or belonging to a particular antibody class or subclass, while the remainder of the antibody is largely derived from an antibody from another species or belonging to another antibody class or subclass. For use in humans, one or more selected rodent CDRs (e.g., mouse CDRs) may be grafted into a human acceptor antibody, replacing one or more of the naturally occurring CDRs of the human antibody. These constructs generally have the advantages of providing full strength human antibody functions, e.g., complement dependent cytotoxicity (CDC) and antibody-dependent cell-mediated cytotoxicity (ADCC) while reducing unwanted immune responses to the antibody by the subject. In one embodiment the CDR grafted antibodies will comprise one or more CDRs obtained from a mouse incorporated in a human framework sequence.

[0156] Similar to the CDR-grafted antibody is a “humanized” antibody. As used herein, a “humanized” antibody is a human antibody (acceptor antibody) comprising one or more amino acid sequences (e.g. CDR sequences) derived from one or more non-human antibodies (donor or source antibody). In certain embodiments, “back mutations” can be introduced into the humanized antibody, in which residues in one or more FRs of the variable region of the recipient human antibody are replaced by corresponding residues from the non-human species donor antibody. Such back mutations may to help maintain the appropriate three-dimensional configuration of the grafted CDR(s) and thereby improve affinity and antibody stability. Antibodies from various donor species may be used including, without limitation, mouse, rat, rabbit, or non-human primate. Furthermore, humanized antibodies may comprise new residues that are not found in the recipient antibody or in the donor antibody to, for example, further refine antibody performance. CDR grafted and humanized antibodies compatible with the instant invention comprising murine components from source antibodies and human components from acceptor antibodies are provided as set forth in the Examples below.

[0157] Various art-recognized techniques can be used to determine which human sequences to use as acceptor antibodies to provide humanized constructs in accordance with the instant invention. Compilations of compatible human germline sequences and methods of determining their suitability as acceptor sequences are disclosed, for example, in Dubel and Reichert (Eds.) (2014) Handbook of Therapeutic Antibodies, 2^{nd} Edition, Wiley-Blackwell GmbH; Tomlinson, I. A. et al. (1992) J. Mol. Biol. 227:776-798; Cook, G. P. et al. (1995) Immunol. Today 16: 237-242; Chothia, D. et al. (1992) J Mol. Biol. 227:799-817; and Tomlinson et al. (1995) EMBO J 14:4628-4638). The V-BASE directory (VBASE2—Retter et a., Nucleic Acid Res. 33; 671-674, 2005) which provides a comprehensive directory of human immunoglobulin variable region sequences (compiled by Tomlinson, I. A. et al. MRC Centre for Protein Engineering, Cambridge, UK) may also be used to identify compatible acceptor sequences. Additionally, consensus human framework sequences described, for example, in U.S. Pat. No. 6,300,064 may also prove to be compatible acceptor sequences are can be used in accordance with the instant teachings. In general, human framework acceptor sequences are selected based on homology with the murine source framework sequences along with an analysis of the CDR canonical structures of the source and acceptor antibodies. The derived sequences of the heavy and light chain variable regions of the derived antibody may then be synthesized using art recognized techniques.

[0158] By way of example CDR grafted and humanized antibodies, and associated methods, are described in U.S. Pat. Nos. 6,180,370 and 5,693,762. For further details, see, e.g., Jones et al., 1986, (PMID: 3713831); and U.S. Pat. Nos. 6,982,321 and 7,087,409.

[0159] The sequence identity or homology of the CDR grafted or humanized antibody variable region to the human acceptor variable region may be determined as discussed herein and, when measured as such, will preferably share at least 60% or 65% sequence identity, more preferably at least 70%, 75%, 80%, 85%, or 90% sequence identity, even more preferably at least 93%, 95%, 98% or 99% sequence identity. Preferably, residue positions which are not identical differ by conservative amino acid substitutions. A “conservative amino acid substitution” is one in which an amino acid residue is substituted by another amino acid residue having a side chain (R group) with similar chemical properties (e.g., charge or hydrophobicity). In general, a conservative amino acid substitution will not substantially change the functional properties of a protein. In cases where two or more amino acid sequences differ from each other by conservative substitutions, the percent sequence identity or degree of similarity may be adjusted upwards to correct for the conservative nature of the substitution.

[0160] It will be appreciated that the annotated CDRs and framework sequences as provided in the appended FIGS. 1A, 1B, 3A, and 3B are defined as per Kabat et al. using a proprietary Abysis database. However, as discussed herein one skilled in the art could readily identify CDRs in accordance with definitions provided by Chothia et al., ABM or MacCallum et al as well as Kabat et al. As such, anti-DLL3 or anti-ASCL1 humanized antibodies comprising one or more CDRs derived according to any of the aforementioned systems are explicitly held to be within the scope of the instant invention.

[0161] 4.2. Site-Specific Antibodies

[0162] The antibodies of the instant invention may be engineered to facilitate conjugation to a cytotoxin or other anti-cancer agent (as discussed in more detail below). It is advantageous for the antibody drug conjugate (ADC) preparation to comprise a homogenous population of ADC molecules in terms of the position of the cytotoxin on the antibody and the drug to antibody ratio (DAR). Based on the instant disclosure one skilled in the art could readily fabricate site-specific engineered constructs as described herein. As used herein a “site-specific antibody” or “site-specific construct” means an antibody, or immunoreactive fragment thereof, wherein at least one amino acid in either the heavy or light chain is deleted, altered or substituted (preferably with another amino acid) to provide at least one free cysteine. Similarly, a “site-specific conjugate” shall be held to mean an ADC comprising a site-specific antibody and at least one cytotoxin or other compound (e.g., a reporter molecule) conjugated to the unpaired or free cysteine(s). In certain embodiments the unpaired cysteine residue will comprise an unpaired intrachain cysteine residue. In other embodiments the free cysteine residue will comprise an unpaired interchain cysteine residue. In still other embodiments the free cysteine may be engineered into the amino acid sequence of the antibody (e.g., in the CH3 domain). In any event the site-specific antibody can be of various isotypes, for example, IgG, IgE, IgA or IgD; and within those classes the antibody can be of various subclasses, for example, IgG1, IgG2, IgG3 or IgG4. For IgG constructs the light chain of the antibody can comprise either a kappa or lambda isotype each incorporating a C214 that, in selected embodiments, may be unpaired due to a lack of a C220 residue in the IgG1 heavy chain.

[0163] Thus, as used herein, the terms “free cysteine” or “unpaired cysteine” may be used interchangeably unless otherwise dictated by context and shall mean any cysteine (or thiol containing) constituent (e.g., a cysteine residue) of an antibody, whether naturally present or specifically incorporated in a selected residue position using molecular engineering techniques, that is not part of a naturally occurring (or “native”) disulfide bond under physiological conditions. In certain selected embodiments the free cysteine may comprise a naturally occurring cysteine whose native interchain or intrachain disulfide bridge partner has been substituted, eliminated or otherwise altered to disrupt the naturally occurring disulfide bridge under physiological conditions thereby rendering the unpaired cysteine suitable for site-specific conjugation. In other preferred embodiments the free or unpaired cysteine will comprise a cysteine residue that is selectively placed at a predetermined site within the antibody heavy or light chain amino acid sequences. It will be appreciated that, prior to conjugation, free or unpaired cysteines may be present as a thiol (reduced cysteine), as a capped cysteine (oxidized) or as part of a non-native intra- or intermolecular disulfide bond (oxidized) with another cysteine or thiol group on the same or different molecule depending on the oxidation state of the system. As discussed in more detail below, mild reduction of the appropriately engineered antibody construct will provide thiols available for site-specific conjugation. Accordingly, in particularly preferred embodiments the free or unpaired cysteines (whether naturally occurring or incorporated) will be subject to selective reduction and subsequent conjugation to provide homogenous DAR compositions.

[0164] It will be appreciated that the favorable properties exhibited by the disclosed engineered conjugate preparations is predicated, at least in part, on the ability to specifically direct the conjugation and largely limit the fabricated conjugates in terms of conjugation position and the absolute DAR value of the composition. Unlike most conventional ADC preparations the present invention need not rely entirely on partial or total reduction of the antibody to provide random conjugation sites and relatively uncontrolled generation of DAR species. Rather, in certain aspects the present invention preferably provides one or more predetermined unpaired (or free) cysteine sites by engineering the targeting antibody to disrupt one or more of the naturally occurring (i.e., “native”) interchain or intrachain disulfide bridges or to introduce a cysteine residue at any position. To this end it will be appreciated that, in selected embodiments, a cysteine residue may be incorporated anywhere along the antibody (or immunoreactive fragment thereof) heavy or light chain or appended thereto using standard molecular engineering techniques. In other preferred embodiments disruption of native disulfide bonds may be effected in combination with the introduction of a non-native cysteine (which will then comprise the free cysteine) that may then be used as a conjugation site.

[0165] In certain embodiments the engineered antibody comprises at least one amino acid deletion or substitution of an intrachain or interchain cysteine residue. As used herein “interchain cysteine residue” means a cysteine residue that is involved in a native disulfide bond either between the light and heavy chain of an antibody or between the two heavy chains of an antibody while an “intrachain cysteine residue” is one naturally paired with another cysteine in the same heavy or light chain. In one embodiment the deleted or substituted interchain cysteine residue is involved in the formation of a disulfide bond between the light and heavy chain. In another embodiment the deleted or substituted cysteine residue is involved in a disulfide bond between the two heavy chains. In a typical embodiment, due to the complementary structure of an antibody, in which the light chain is paired with the VH and CH1 domains of the heavy chain and wherein the CH2 and CH3 domains of one heavy chain are paired with the CH2 and CH3 domains of the complementary heavy chain, a mutation or deletion of a single cysteine in either the light chain or in the heavy chain would result in two unpaired cysteine residues in the engineered antibody.

[0166] In some embodiments an interchain cysteine residue is deleted. In other embodiments an interchain cysteine is substituted for another amino acid (e.g., a naturally occurring amino acid). For example, the amino acid substitution can result in the replacement of an interchain cysteine with a neutral (e.g. serine, threonine or glycine) or hydrophilic (e.g. methionine, alanine, valine, leucine or isoleucine) residue. In selected embodiments an interchain cysteine is replaced with a serine.

[0167] In some embodiments contemplated by the invention the deleted or substituted cysteine residue is on the light chain (either kappa or lambda) thereby leaving a free cysteine on the heavy chain. In other embodiments the deleted or substituted cysteine residue is on the heavy chain leaving the free cysteine on the light chain constant region. Upon assembly it will be appreciated that deletion or substitution of a single cysteine in either the light or heavy chain of an intact antibody results in a site-specific antibody having two unpaired cysteine residues.

[0168] In one embodiment the cysteine at position 214 (C214) of the IgG light chain (kappa or lambda) is deleted or substituted. In another embodiment the cysteine at position 220 (C220) on the IgG heavy chain is deleted or substituted. In further embodiments the cysteine at position 226 or position 229 on the heavy chain is deleted or substituted. In one embodiment C220 on the heavy chain is substituted with serine (C220S) to provide the desired free cysteine in the light chain. In another embodiment C214 in the light chain is substituted with serine (C214S) to provide the desired free cysteine in the heavy chain. Such site-specific constructs are described in more detail in the Examples below. A summary of compatible site-specific constructs is shown in Table 2 immediately below where numbering is generally according to the Eu index as set forth in Kabat, WT stands for “wild-type” or native constant region sequences without alterations and delta (Δ) designates the deletion of an amino acid residue (e.g., C214Δ indicates that the cysteine residue at position 214 has been deleted).

TABLE 2

| Designation | Antibody Component | Alteration |
|---|---|---|
| ss1 | Heavy Chain | C220S |
| | Light Chain | WT |
| ss2 | Heavy Chain | C220Δ |
| | Light Chain | WT |
| ss3 | Heavy Chain | WT |
| | Light Chain | C214Δ |
| ss4 | Heavy Chain | WT |
| | Light Chain | C214S |

[0169] With regard to the introduction or addition of a cysteine residue or residues to provide a free cysteine (as opposed to disrupting a native disulfide bond) compatible position(s) on the antibody or antibody fragment may readily be discerned by one skilled in the art. Accordingly, in selected embodiments the cysteine(s) may be introduced in the CH1 domain, the CH2 domain or the CH3 domain or any combination thereof depending on the desired DAR, the antibody construct, the selected payload and the antibody target. In other preferred embodiments the cysteines may be introduced into a kappa or lambda CL domain and, in particularly preferred embodiments, in the c-terminal region of the CL domain. In each case other amino acid residues proximal to the site of cysteine insertion may be altered, removed or substituted to facilitate molecular stability, conjugation efficiency or provide a protective environment for the payload once it is attached. In particular embodiments, the substituted residues occur at any accessible sites of the antibody. By substituting such surface residues with cysteine, reactive thiol groups are thereby positioned at readily accessible sites on the antibody and may be selectively reduced as described further herein. In particular embodiments, the substituted residues occur at accessible sites of the antibody. By substituting those residues with cysteine, reactive thiol groups are thereby positioned at accessible sites of the antibody and may be used to selectively conjugate the antibody. In certain embodiments, any one or more of the following residues may be substituted with cysteine: V205 (Kabat numbering) of the light chain; A118 (Eu numbering) of the heavy chain; and S400 (Eu numbering) of the heavy chain Fc region. Additional substitution positions and methods of fabricating compatible site-specific antibodies are set forth in U.S. Pat. No. 7,521,541 which is incorporated herein in its entirety.

[0170] The strategy for generating antibody drug conjugates with defined sites and stoichiometries of drug loading, as disclosed herein, is broadly applicable to all anti-DLL3 or anti-ASCL1antibodies as it primarily involves engineering of the conserved constant domains of the antibody. As the amino acid sequences and native disulfide bridges of each class and subclass of antibody are well documented, one skilled in the art could readily fabricate engineered constructs of various antibodies without undue experimentation and, accordingly, such constructs are expressly contemplated as being within the scope of the instant invention.

[0171] The strategy for generating antibody-drug conjugates with defined sites and stoichiometries of drug loading, as disclosed herein, is broadly applicable to all anti-DLL3 or anti-ASCL1 antibodies as it primarily involves engineering of the conserved constant domains of the antibody. As the amino acid sequences and native disulfide bridges of each class and subclass of antibody are well documented, one skilled in the art could readily fabricate engineered constructs of various DLL3 or ASCL1 antibodies without undue experimentation and, accordingly, such constructs are expressly contemplated as being within the scope of the instant invention.

[0172] 4.3 Constant Region Modifications and Altered Glycosylation

[0173] Selected embodiments of the present invention may also comprise substitutions or modifications of the constant region (i.e. the Fc region), including without limitation, amino acid residue substitutions, mutations and/or modifications, which result in a compound with characteristics including, but not limited to: altered pharmacokinetics, increased serum half-life, increase binding affinity, reduced immunogenicity, increased production, altered Fc ligand binding to an Fc receptor (FcR), enhanced or reduced ADCC or CDC, altered glycosylation and/or disulfide bonds and modified binding specificity.

[0174] Compounds with improved Fc effector functions can be generated, for example, through changes in amino acid residues involved in the interaction between the Fc domain and an Fc receptor (e.g., FcγRI, FcγRIIA and B, FcγRIII and FcRn), which may lead to increased cytotoxicity and/or altered pharmacokinetics, such as increased serum half-life (see, for example, Ravetch and Kinet, Annu. Rev. Immunol 9:457-92 (1991); Capel et al., Immunomethods 4:25-34 (1994); and de Haas et al., J. Lab. Clin. Med. 126:330-41 (1995).

[0175] In selected embodiments, antibodies with increased in vivo half-lives can be generated by modifying (e.g., substituting, deleting or adding) amino acid residues identified as involved in the interaction between the Fc domain and the FcRn receptor (see, e.g., International Publication Nos. WO 97/34631; WO 04/029207; U.S. Pat. No. 6,737,056 and U.S.P.N. 2003/0190311). With regard to such embodiments, Fc variants may provide half-lives in a mammal, preferably a human, of greater than 5 days, greater than 10 days, greater than 15 days, preferably greater than 20 days, greater than 25 days, greater than 30 days, greater than 35 days, greater than 40 days, greater than 45 days, greater than 2 months, greater than 3 months, greater than 4 months, or greater than 5 months. The increased half-life results in a higher serum titer which thus reduces the frequency of the administration of the antibodies and/or reduces the concentration of the antibodies to be administered. Binding to human FcRn in vivo and serum half-life of human FcRn high affinity binding polypeptides can be assayed, e.g., in transgenic mice or transfected human cell lines expressing human FcRn, or in primates to which the polypeptides with a variant Fc region are administered. WO 2000/42072 describes antibody variants with improved or diminished binding to FcRns. See also, e.g., Shields et al. J. Biol. Chem. 9(2):6591-6604 (2001). Surprisingly, certain ADCs of the instant invention exhibit protracted terminal half-lives (e.g., on the order of two weeks) without any antibody constant region modifications other than those used to provide optional site-specific conjugates.

[0176] In other embodiments, Fc alterations may lead to enhanced or reduced ADCC or CDC activity. As in known in the art, CDC refers to the lysing of a target cell in the presence of complement, and ADCC refers to a form of cytotoxicity in which secreted Ig bound onto FcRs present on certain cytotoxic cells (e.g., Natural Killer cells, neutrophils, and macrophages) enables these cytotoxic effector cells to bind specifically to an antigen-bearing target cell and subsequently kill the target cell with cytotoxins. In the context of the instant invention antibody variants are provided with “altered” FcR binding affinity, which is either enhanced or diminished binding as compared to a parent or unmodified antibody or to an antibody comprising a native sequence FcR. Such variants which display decreased binding may possess little or no appreciable binding, e.g., 0-20% binding to the FcR compared to a native sequence, e.g. as determined by techniques well known in the art. In other embodiments the variant will exhibit enhanced binding as compared to the native immunoglobulin Fc domain. It will be appreciated that these types of Fc variants may advantageously be used to enhance the effective anti-neoplastic properties of the disclosed antibodies. In yet other embodiments, such alterations lead to increased binding affinity, reduced immunogenicity, increased production, altered glycosylation and/or disulfide bonds (e.g., for conjugation sites), modified binding specificity, increased phagocytosis; and/or down regulation of cell surface receptors (e.g. B cell receptor; BCR), etc.

[0177] Still other embodiments comprise one or more engineered glycoforms, e.g., a site-specific antibody comprising an altered glycosylation pattern or altered carbohydrate composition that is covalently attached to the protein (e.g., in the Fc domain). See, for example, Shields, R. L. et al. (2002) J. Biol. Chem. 277:26733-26740. Engineered glycoforms may be useful for a variety of purposes, including but not limited to enhancing or reducing effector function, increasing the affinity of the antibody for a target or facilitating production of the antibody. In certain embodiments where reduced effector function is desired, the molecule may be engineered to express an aglycosylated form. Substitutions that may result in elimination of one or more variable region framework glycosylation sites to thereby eliminate glycosylation at that site are well known (see e.g. U.S. Pat. Nos. 5,714,350 and 6,350,861). Conversely, enhanced effector functions or improved binding may be imparted to the Fc containing molecule by engineering in one or more additional glycosylation sites.

[0178] Other embodiments include an Fc variant that has an altered glycosylation composition, such as a hypofucosylated antibody having reduced amounts of fucosyl residues or an antibody having increased bisecting GlcNAc structures. Such altered glycosylation patterns have been demonstrated to increase the ADCC ability of antibodies. Engineered glycoforms may be generated by any method known to one skilled in the art, for example by using engineered or variant expression strains, by co-expression with one or more enzymes (for example N-acetylglucosaminyltransferase III (GnTIII)), by expressing a molecule comprising an Fc region in various organisms or cell lines from various organisms or by modifying carbohydrate(s) after the molecule comprising Fc region has been expressed (see, for example, WO 2012/117002).

[0179] 4.4 Fragments

[0180] Regardless of which form of antibody (e.g. chimeric, humanized, etc.) is selected to practice the invention it will be appreciated that immunoreactive fragments, either by themselves or as part of an antibody drug conjugate, of the same may be used in accordance with the teachings herein. An “antibody fragment” comprises at least a portion of an intact antibody. As used herein, the term “fragment” of an antibody molecule includes antigen-binding fragments of antibodies, and the term “antigen-binding fragment” refers to a polypeptide fragment of an immunoglobulin or antibody that immunospecifically binds or reacts with a selected antigen or immunogenic determinant thereof or competes with the intact antibody from which the fragments were derived for specific antigen binding.

[0181] Exemplary site-specific fragments include: variable light chain fragments (VL), an variable heavy chain fragments (VH), scFv, F(ab′)2 fragment, Fab fragment, Fd fragment, Fv fragment, single domain antibody fragments, diabodies, linear antibodies, single-chain antibody molecules and multispecific antibodies formed from antibody fragments. In addition, an active site-specific fragment comprises a portion of the antibody that retains its ability to interact with the antigen/substrates or receptors and modify them in a manner similar to that of an intact antibody (though maybe with somewhat less efficiency). Such antibody fragments may further be engineered to comprise one or more free cysteines as described herein.

[0182] In other embodiments, an antibody fragment is one that comprises the Fc region and that retains at least one of the biological functions normally associated with the Fc region when present in an intact antibody, such as FcRn binding, antibody half-life modulation, ADCC function and complement binding. In one embodiment, an antibody fragment is a monovalent antibody that has an in vivo half-life substantially similar to an intact antibody. For example, such an antibody fragment may comprise an antigen binding arm linked to an Fc sequence comprising at least one free cysteine capable of conferring in vivo stability to the fragment.

[0183] As would be well recognized by those skilled in the art, fragments can be obtained by molecular engineering or via chemical or enzymatic treatment (such as papain or pepsin) of an intact or complete antibody or antibody chain or by recombinant means. See, e.g., Fundamental Immunology, W. E. Paul, ed., Raven Press, N.Y. (1999), for a more detailed description of antibody fragments.

[0184] 4.5 Multivalent Constructs

[0185] In other embodiments, the antibodies and conjugates of the invention may be monovalent or multivalent (e.g., bivalent, trivalent, etc.). As used herein, the term “valency” refers to the number of potential target binding sites associated with an antibody. Each target binding site specifically binds one target molecule or specific position or locus on a target molecule. When an antibody is monovalent, each binding site of the molecule will specifically bind to a single antigen position or epitope. When an antibody comprises more than one target binding site (multivalent), each target binding site may specifically bind the same or different molecules (e.g., may bind to different ligands or different antigens, or different epitopes or positions on the same antigen). See, for example, U.S.P.N. 2009/0130105.

[0186] In one embodiment, the antibodies are bispecific antibodies in which the two chains have different specificities, as described in Millstein et al., 1983, Nature, 305:537-539. Other embodiments include antibodies with additional specificities such as trispecific antibodies. Other more sophisticated compatible multispecific constructs and methods of their fabrication are set forth in U.S.P.N. 2009/0155255, as well as WO 94/04690; Suresh et al., 1986, Methods in Enzymology, 121:210; and WO96/27011.

[0187] Multivalent antibodies may immunospecifically bind to different epitopes of the desired target molecule or may immunospecifically bind to both the target molecule as well as a heterologous epitope, such as a heterologous polypeptide or solid support material. While selected embodiments may only bind two antigens (i.e. bispecific antibodies), antibodies with additional specificities such as trispecific antibodies are also encompassed by the instant invention. Bispecific antibodies also include cross-linked or “heteroconjugate” antibodies. For example, one of the antibodies in the heteroconjugate can be coupled to avidin, the other to biotin. Such antibodies have, for example, been proposed to target immune system cells to unwanted cells (U.S. Pat. No. 4,676,980), and for treatment of HIV infection (WO 91/00360, WO 92/200373, and EP 03089). Heteroconjugate antibodies may be made using any convenient cross-linking methods. Suitable cross-linking agents are well known in the art, and are disclosed in U.S. Pat. No. 4,676,980, along with a number of cross-linking techniques.

[0188] 5. Recombinant Production of Antibodies

[0189] Antibodies and fragments thereof may be produced or modified using genetic material obtained from antibody producing cells and recombinant technology (see, for example; Dubel and Reichert (Eds.) (2014) Handbook of Therapeutic Antibodies, 2^{nd} Edition, Wiley-Blackwell GmbH; Sambrook and Russell (Eds.) (2000) Molecular Cloning. A Laboratory Manual (3^{rd} Ed.), NY, Cold Spring Harbor Laboratory Press; Ausubel et al. (2002) Short Protocols in Molecular Biology: A Compendium of Methods from Current Protocols in Molecular Biology, Wiley, John & Sons, Inc.; and U.S. Pat. No. 7,709,611).

[0190] Another aspect of the invention pertains to nucleic acid molecules that encode the antibodies of the invention. The nucleic acids may be present in whole cells, in a cell lysate, or in a partially purified or substantially pure form. A nucleic acid is “isolated” or rendered substantially pure when separated from other cellular components or other contaminants, e.g., other cellular nucleic acids or proteins, by standard techniques, including alkaline/SDS treatment, CsCl banding, column chromatography, agarose gel electrophoresis and others well known in the art. A nucleic acid of the invention can be, for example, DNA (e.g. genomic DNA, cDNA), RNA and artificial variants thereof (e.g., peptide nucleic acids), whether single-stranded or double-stranded or RNA, RNA and may or may not contain introns. In selected embodiments the nucleic acid is a cDNA molecule.

[0191] Nucleic acids of the invention can be obtained using standard molecular biology techniques. For antibodies expressed by hybridomas (e.g., hybridomas prepared as described in the Examples below), cDNAs encoding the light and heavy chains of the antibody can be obtained by standard PCR amplification or cDNA cloning techniques. For antibodies obtained from an immunoglobulin gene library (e.g., using phage display techniques), nucleic acid encoding the antibody can be recovered from the library.

[0192] DNA fragments encoding VH and VL segments can be further manipulated by standard recombinant DNA techniques, for example to convert the variable region genes to full-length antibody chain genes, to Fab fragment genes or to a scFv gene. In these manipulations, a VL- or VH-encoding DNA fragment is operatively linked to another DNA fragment encoding another protein or protein fragment, such as an antibody constant region or a flexible linker. The term “operatively linked”, as used in this context, means that the two DNA fragments are joined such that the amino acid sequences encoded by the two DNA fragments remain in-frame.

[0193] The isolated DNA encoding the VH region can be converted to a full-length heavy chain gene by operatively linking the VH-encoding DNA to another DNA molecule encoding heavy chain constant regions (CH1, CH2 and CH3 in the case of IgG1). The sequences of human heavy chain constant region genes are known in the art (see e.g., Kabat, et al. (1991) (supra)) and DNA fragments encompassing these regions can be obtained by standard PCR amplification. The heavy chain constant region can be an IgG1, IgG2, IgG3, IgG4, IgA, IgE, IgM or IgD constant region, but most preferably is an IgG1 or IgG4 constant region. An exemplary IgG1 constant region is set forth in SEQ ID NO: 2. For a Fab fragment heavy chain gene, the VH-encoding DNA can be operatively linked to another DNA molecule encoding only the heavy chain CH1 constant region.

[0194] Isolated DNA encoding the VL region can be converted to a full-length light chain gene (as well as a Fab light chain gene) by operatively linking the VL-encoding DNA to another DNA molecule encoding the light chain constant region, CL. The sequences of human light chain constant region genes are known in the art (see e.g., Kabat, et al. (1991) (supra)) and DNA fragments encompassing these regions can be obtained by standard PCR amplification. The light chain constant region can be a kappa or lambda constant region, but most preferably is a kappa constant region. An exemplary compatible kappa light chain constant region is set forth in SEQ ID NO: 5.

[0195] Contemplated herein are certain polypeptides (e.g. antigens or antibodies) that exhibit “sequence identity”, sequence similarity” or “sequence homology” to the polypeptides of the invention. For example, a derived humanized antibody VH or VL domain may exhibit a sequence similarity with the source (e.g., murine) or acceptor (e.g., human) VH or VL domain. A “homologous” polypeptide may exhibit 65%, 70%, 75%, 80%, 85%, or 90% sequence identity. In other embodiments a “homologous” polypeptides may exhibit 93%, 95% or 98% sequence identity. As used herein, the percent homology between two amino acid sequences is equivalent to the percent identity between the two sequences. The percent identity between the two sequences is a function of the number of identical positions shared by the sequences (i.e., % homology=# of identical positions/total # of positions×100), taking into account the number of gaps, and the length of each gap, which need to be introduced for optimal alignment of the two sequences. The comparison of sequences and determination of percent identity between two sequences can be accomplished using a mathematical algorithm, as described in the non-limiting examples below.

[0196] The percent identity between two amino acid sequences can be determined using the algorithm of E. Meyers and W. Miller (Comput. Appl. Biosci., 4:11-17 (1988)) which has been incorporated into the ALIGN program (version 2.0), using a PAM120 weight residue table, a gap length penalty of 12 and a gap penalty of 4. In addition, the percent identity between two amino acid sequences can be determined using the Needleman and Wunsch (J. Mol. Biol. 48:444-453 (1970)) algorithm which has been incorporated into the GAP program in the GCG software package (available at www.gcg.com), using either a Blossum 62 matrix or a PAM250 matrix, and a gap weight of 16, 14, 12, 10, 8, 6, or 4 and a length weight of 1, 2, 3, 4, 5, or 6.

[0197] Additionally or alternatively, the protein sequences of the present invention can further be used as a “query sequence” to perform a search against public databases to, for example, identify related sequences. Such searches can be performed using the XBLAST program (version 2.0) of Altschul, et al. (1990) J. Mol. Biol. 215:403-10. BLAST protein searches can be performed with the XBLAST program, score=50, wordlength=3 to obtain amino acid sequences homologous to the antibody molecules of the invention. To obtain gapped alignments for comparison purposes, Gapped BLAST can be utilized as described in Altschul et al., (1997) Nucleic Acids Res. 25(17):3389-3402. When utilizing BLAST and Gapped BLAST programs, the default parameters of the respective programs (e.g., XBLAST and NBLAST) can be used.

[0198] Residue positions which are not identical may differ by conservative amino acid substitutions or by non-conservative amino acid substitutions. A “conservative amino acid substitution” is one in which an amino acid residue is substituted by another amino acid residue having a side chain with similar chemical properties (e.g., charge or hydrophobicity). In general, a conservative amino acid substitution will not substantially change the functional properties of a protein. In cases where two or more amino acid sequences differ from each other by conservative substitutions, the percent sequence identity or degree of similarity may be adjusted upwards to correct for the conservative nature of the substitution. In cases where there is a substitution with a non-conservative amino acid, in embodiments the polypeptide exhibiting sequence identity will retain the desired function or activity of the polypeptide of the invention (e.g., antibody.)

[0199] Also contemplated herein are nucleic acids that that exhibit “sequence identity”, sequence similarity” or “sequence homology” to the nucleic acids of the invention. A “homologous sequence” means a sequence of nucleic acid molecules exhibiting at least about 65%, 70%, 75%, 80%, 85%, or 90% sequence identity. In other embodiments, a “homologous sequence” of nucleic acids may exhibit 93%, 95% or 98% sequence identity to the reference nucleic acid.

[0200] The instant invention also provides vectors comprising such nucleic acids described above, which may be operably linked to a promoter (see, e.g., WO 86/05807; WO 89/01036; and U.S. Pat. No. 5,122,464); and other transcriptional regulatory and processing control elements of the eukaryotic secretory pathway. The invention also provides host cells harboring those vectors and host-expression systems.

[0201] As used herein, the term “host-expression system” includes any type of cellular system that can be engineered to generate either the nucleic acids or the polypeptides and antibodies of the invention. Such host-expression systems include, but are not limited to microorganisms (e.g., E. coli or B. subtilis) transformed or transfected with recombinant bacteriophage DNA or plasmid DNA; yeast (e.g., Saccharomyces) transfected with recombinant yeast expression vectors; or mammalian cells (e.g., COS, CHO—S, HEK293T, 3T3 cells) harboring recombinant expression constructs containing promoters derived from the genome of mammalian cells or viruses (e.g., the adenovirus late promoter). The host cell may be co-transfected with two expression vectors, for example, the first vector encoding a heavy chain derived polypeptide and the second vector encoding a light chain derived polypeptide.

[0202] Methods of transforming mammalian cells are well known in the art. See, for example, U.S. Pat. Nos. 4,399,216, 4,912,040, 4,740,461, and 4,959,455. The host cell may also be engineered to allow the production of an antigen binding molecule with various characteristics (e.g. modified glycoforms or proteins having GnTIII activity).

[0203] For long-term, high-yield production of recombinant proteins stable expression is preferred. Accordingly, cell lines that stably express the selected antibody may be engineered using standard art recognized techniques and form part of the invention. Rather than using expression vectors that contain viral origins of replication, host cells can be transformed with DNA controlled by appropriate expression control elements (e.g., promoter or enhancer sequences, transcription terminators, polyadenylation sites, etc.), and a selectable marker. Any of the selection systems well known in the art may be used, including the glutamine synthetase gene expression system (the GS system) which provides an efficient approach for enhancing expression under selected conditions. The GS system is discussed in whole or part in connection with EP 0 216 846, EP 0 256 055, EP 0 323 997 and EP 0 338 841 and U.S. Pat. Nos. 5,591,639 and 5,879,936. Another compatible expression system for the development of stable cell lines is the Freedom™ CHO—S Kit (Life Technologies).

[0204] Once an antibody of the invention has been produced by recombinant expression or any other of the disclosed techniques, it may be purified or isolated by methods known in the art in that it is identified and separated and/or recovered from its natural environment and separated from contaminants that would interfere with diagnostic or therapeutic uses for the antibody or related ADC. Isolated antibodies include antibodies in situ within recombinant cells.

[0205] These isolated preparations may be purified using various art-recognized techniques, such as, for example, ion exchange and size exclusion chromatography, dialysis, diafiltration, and affinity chromatography, particularly Protein A or Protein G affinity chromatography. Compatible methods are discussed more fully in the Examples below.

[0206] 6. Post-Production Selection

[0207] No matter how obtained, antibody-producing cells (e.g., hybridomas, yeast colonies, etc.) may be selected, cloned and further screened for desirable characteristics including, for example, robust growth, high antibody production and desirable antibody characteristics such as high affinity for the antigen of interest. Hybridomas can be expanded in vitro in cell culture or in vivo in syngeneic immunocompromised animals. Methods of selecting, cloning and expanding hybridomas and/or colonies are well known to those of ordinary skill in the art. Once the desired antibodies are identified the relevant genetic material may be isolated, manipulated and expressed using common, art-recognized molecular biology and biochemical techniques.

[0208] The antibodies produced by naïve libraries (either natural or synthetic) may be of moderate affinity (Kₐ of about 10⁶ to 10⁷ M¹). To enhance affinity, affinity maturation may be mimicked in vitro by constructing antibody libraries (e.g., by introducing random mutations in vitro by using error-prone polymerase) and reselecting antibodies with high affinity for the antigen from those secondary libraries (e.g. by using phage or yeast display). WO 9607754 describes a method for inducing mutagenesis in a CDR of an immunoglobulin light chain to create a library of light chain genes.

[0209] Various techniques can be used to select antibodies, including but not limited to, phage or yeast display in which a library of human combinatorial antibodies or scFv fragments is synthesized on phages or yeast, the library is screened with the antigen of interest or an antibody-binding portion thereof, and the phage or yeast that binds the antigen is isolated, from which one may obtain the antibodies or immunoreactive fragments (Vaughan et al., 1996, PMID: 9630891; Sheets et al., 1998, PMID: 9600934; Boder et al., 1997, PMID: 9181578; Pepper et al., 2008, PMID: 18336206). Kits for generating phage or yeast display libraries are commercially available. There also are other methods and reagents that can be used in generating and screening antibody display libraries (see U.S. Pat. No. 5,223,409; WO 92/18619, WO 91/17271, WO 92/20791, WO 92/15679, WO 93/01288, WO 92/01047, WO 92/09690; and Barbas et al., 1991, PMID: 1896445). Such techniques advantageously allow for the screening of large numbers of candidate antibodies and provide for relatively easy manipulation of sequences (e.g., by recombinant shuffling).

### V. Characteristics of Antibodies

[0210] In certain embodiments, antibody-producing cells (e.g., hybridomas or yeast colonies) may be selected, cloned and further screened for favorable properties including, for example, robust growth, high antibody production and, as discussed in more detail below, desirable site-specific antibody characteristics. In other cases characteristics of the antibody may be imparted by selecting a particular antigen (e.g., a specific DLL3 or ASCL1 isoform) or immunoreactive fragment of the target antigen for inoculation of the animal. In still other embodiments the selected antibodies may be engineered as described above to enhance or refine immunochemical characteristics such as affinity or pharmacokinetics.

[0211] A. Neutralizing Antibodies

[0212] In certain embodiments, the conjugates will comprise “neutralizing” antibodies or derivatives or fragments thereof. That is, the present invention may comprise antibody molecules that bind specific domains, motifs or epitopes and are capable of blocking, reducing or inhibiting the biological activity of DLL3 or ASCL1. More generally the term “neutralizing antibody” refers to an antibody that binds to or interacts with a target molecule or ligand and prevents binding or association of the target molecule to a binding partner such as a receptor or substrate, thereby interrupting a biological response that otherwise would result from the interaction of the molecules.

[0213] It will be appreciated that competitive binding assays known in the art may be used to assess the binding and specificity of an antibody or immunologically functional fragment or derivative thereof. With regard to the instant invention an antibody or fragment will be held to inhibit or reduce binding of DLL3 or ASCL1 to a binding partner or substrate when an excess of antibody reduces the quantity of binding partner bound to DLL3 or ASCL1 by at least about 20%, 30%, 40%, 50%, 60%, 70%, 80%, 85%, 90%, 95%, 97%, 99% or more as measured, for example, by Notch receptor activity or in an in vitro competitive binding assay. In the case of antibodies to DLL3 for example, a neutralizing antibody or antagonist will preferably alter Notch receptor activity by at least about 20%, 30%, 40%, 50%, 60%, 70%, 80%, 85%, 90%, 95%, 97%, 99% or more. It will be appreciated that this modified activity may be measured directly using art-recognized techniques or may be measured by the impact the altered activity has downstream (e.g., oncogenesis, cell survival or activation or suppression of Notch responsive genes). Preferably, the ability of an antibody to neutralize DLL3 activity is assessed by inhibition of DLL3 binding to a Notch receptor or by assessing its ability to relieve DLL3 mediated repression of Notch signaling.

[0214] B. Internalizing Antibodies

[0215] In certain embodiments the antibodies may comprise internalizing antibodies such that the antibody will bind to a determinant and will be internalized (along with any conjugated pharmaceutically active moiety) into a selected target cell including tumorigenic cells. The number of antibody molecules internalized may be sufficient to kill an antigen-expressing cell, especially an antigen-expressing tumorigenic cell. Depending on the potency of the antibody or, in some instances, antibody drug conjugate, the uptake of a single antibody molecule into the cell may be sufficient to kill the target cell to which the antibody binds. With regard to the instant invention there is evidence that a substantial portion of expressed DLL3 protein remains associated with the tumorigenic cell surface, thereby allowing for localization and internalization of the disclosed antibodies or ADCs. In selected embodiments such antibodies will be associated with, or conjugated to, one or more drugs that kill the cell upon internalization. In some embodiments the ADCs of the instant invention will comprise an internalizing site-specific ADC.

[0216] As used herein, an antibody that “internalizes” is one that is taken up (along with any conjugated cytotoxin) by a target cell upon binding to an associated determinant. The number of such ADCs internalized will preferably be sufficient to kill the determinant-expressing cell, especially a determinant-expressing cancer stem cell. Depending on the potency of the cytotoxin or ADC as a whole, in some instances the uptake of a few antibody molecules into the cell is sufficient to kill the target cell to which the antibody binds. For example, certain drugs such as PBDs or calicheamicin are so potent that the internalization of a few molecules of the toxin conjugated to the antibody is sufficient to kill the target cell. Whether an antibody internalizes upon binding to a mammalian cell can be determined by various art-recognized assays (e.g., saporin assays such as Mab-Zap and Fab-Zap; Advanced Targeting Systems). Methods of detecting whether an antibody internalizes into a cell are also described in U.S. Pat. No. 7,619,068.

[0217] C. Depleting Antibodies

[0218] In other embodiments the antibodies of the invention are depleting antibodies. The term “depleting” antibody refers to an antibody that preferably binds to an antigen on or near the cell surface and induces, promotes or causes the death of the cell (e.g., by CDC, ADCC or introduction of a cytotoxic agent). In embodiments, the selected depleting antibodies will be conjugated to a cytotoxin.

[0219] Preferably a depleting antibody will be able to kill at least 20%, 30%, 40%, 50%, 60%, 70%, 80%, 85%, 90%, 95%, 97%, or 99% of DLL3-expressing cells or ASCL1-expressing cells in a defined cell population. In some embodiments the cell population may comprise enriched, sectioned, purified or isolated tumorigenic cells, including cancer stem cells. In other embodiments the cell population may comprise whole tumor samples or heterogeneous tumor extracts that comprise cancer stem cells. Standard biochemical techniques may be used to monitor and quantify the depletion of tumorigenic cells in accordance with the teachings herein.

[0220] D. Binding Affinity

[0221] Disclosed herein are antibodies that have a high binding affinity for a specific determinant e.g. DLL3 or ASCL1. The term “K_{D}” refers to the dissociation constant or apparent affinity of a particular antibody-antigen interaction. An antibody of the invention can immunospecifically bind its target antigen when the dissociation constant K_{D} (k_{off}/kₒₙ) is ≤10⁻⁷M. The antibody specifically binds antigen with high affinity when the K_{D} is ≤5×10⁻⁹ M, and with very high affinity when the K_{D} is ≤5×10⁻¹⁰ M. In one embodiment of the invention, the antibody has a K_{D} of ≤10⁻⁹ M and an off-rate of about 1×10⁻⁴/sec. In one embodiment of the invention, the off-rate is ≤1×10⁻⁵/sec. In other embodiments of the invention, the antibodies will bind to a determinant with a K_{D} of between about 10⁻⁷ M and 10⁻¹⁰ M, and in yet another embodiment it will bind with a K_{D}≤2×10⁻¹⁰ M. Still other selected embodiments of the invention comprise antibodies that have a K_{D} (k_{off}/kₒₙ) of less than 10⁻⁶ M, less than 5×10⁻⁶ M, less than 10⁻⁷ M, less than 5×10⁷ M, less than 10⁻⁸ M, less than 5×10⁻⁸ M, less than 10⁻⁹ M, less than 5×10⁻⁹ M, less than 10⁻¹⁰ M, less than 5×10⁻¹⁰ M, less than 10⁻¹¹ M, less than 5×10⁻¹¹ M, less than 10⁻¹² M, less than 5×10⁻¹² M, less than 10⁻¹³ M, less than 5×10⁻¹³ M, less than 10⁻¹⁴ M, less than 5×10⁻¹⁴ M, less than 10⁻¹⁵ M or less than 5×10⁻¹⁵ M.

[0222] In certain embodiments, an antibody of the invention that immunospecifically binds to a determinant e.g. DLL3 or ASCL1 may have an association rate constant or kₒₙ (or kₐ) rate (antibody+antigen (Ag)^{k}ₒₙ←antibody-Ag) of at least 10⁵ M⁻¹s⁻¹, at least 2×10⁵ M⁻¹s⁻¹, at least 5×10⁵ M⁻¹s⁻¹, at least 10⁶ M⁻¹s⁻¹, at least 5×10⁶ M⁻¹s⁻¹, at least 10⁷ M⁻¹s⁻¹, at least 5×10⁷ M⁻¹s⁻¹, or at least 10⁸ M⁻¹s⁻¹.

[0223] In another embodiment, an antibody of the invention that immunospecifically binds to a determinant e.g. DLL3 or ASCL1 may have a disassociation rate constant or k_{off} (or k_{d}) rate (antibody+antigen (Ag)^{k}_{off}←antibody-Ag) of less than 10⁻¹ s⁻¹, less than 5×10⁻¹ s⁻¹, less than 10⁻² s⁻¹, less than 5×10⁻² s⁻¹, less than 10⁻³ s⁻¹, less than 5×10⁻³ s⁻¹, less than 10⁻⁴ s⁻¹, less than 5×10⁻⁴ s⁻¹, less than 10⁻⁵ s⁻¹, less than 5×10⁻⁵ s⁻¹, less than 10⁻⁶ s⁻¹, less than 5×10⁻⁶ s⁻¹ less than 10⁻⁷ s⁻¹, less than 5×10⁻⁷ s⁻¹, less than 10⁻⁸ s⁻¹, less than 5×10⁸ s⁻¹, less than 10⁻⁹ s⁻¹, less than 5×10⁻⁹ s⁻¹ or less than 10⁻¹⁰ s⁻¹.

[0224] Binding affinity may be determined using various techniques known in the art, for example, surface plasmon resonance, bio-layer interferometry, dual polarization interferometry, static light scattering, dynamic light scattering, isothermal titration calorimetry, ELISA, analytical ultracentrifugation, and flow cytometry. s

[0225] E. Binning and Epitope Mapping

[0226] Antibodies disclosed herein may be characterized in terms of the discrete epitope with which they associate. An “epitope” is the portion(s) of a determinant to which the antibody or immunoreactive fragment specifically binds. Immunospecific binding can be confirmed and defined based on binding affinity, as described above, or by the preferential recognition by the antibody of its target antigen in a complex mixture of proteins and/or macromolecules (e.g. in competition assays). A “linear epitope”, is formed by contiguous amino acids in the antigen that allow for immunospecific binding of the antibody. The ability to preferentially bind linear epitopes is typically maintained even when the antigen is denatured. Conversely, a “conformational epitope”, usually comprises non-contiguous amino acids in the antigen's amino acid sequence but, in the context of the antigen's secondary, tertiary or quaternary structure, are sufficiently proximate to be bound concomitantly by a single antibody. When antigens with conformational epitopes are denatured, the antibody will typically no longer recognize the antigen. An epitope (contiguous or non-contiguous) typically includes at least 3, and more usually, at least 5 or 8-10 or 12-20 amino acids in a unique spatial conformation.

[0227] It is also possible to characterize the antibodies of the invention in terms of the group or “bin” to which they belong. “Binning” refers to the use of competitive antibody binding assays to identify pairs of antibodies that are incapable of binding an immunogenic determinant simultaneously, thereby identifying antibodies that “compete” for binding. Competing antibodies may be determined by an assay in which the antibody or immunologically functional fragment being tested prevents or inhibits specific binding of a reference antibody to a common antigen. Typically, such an assay involves the use of purified antigen (e.g., DLL3, ASCL1, or a domain or fragment thereof) bound to a solid surface or cells, an unlabeled test antibody and a labeled reference antibody. Competitive inhibition is measured by determining the amount of label bound to the solid surface or cells in the presence of the test antibody. Additional details regarding methods for determining competitive binding are provided in the Examples herein. Usually, when a competing antibody is present in excess, it will inhibit specific binding of a reference antibody to a common antigen by at least 30%, 40%, 45%, 50%, 55%, 60%, 65%, 70% or 75%. In some instance, binding is inhibited by at least 80%, 85%, 90%, 95%, or 97% or more. Conversely, when the reference antibody is bound it will preferably inhibit binding of a subsequently added test antibody (i.e., a DLL3 antibody or ASCL1 antibody) by at least 30%, 40%, 45%, 50%, 55%, 60%, 65%, 70% or 75%. In some instance, binding of the test antibody is inhibited by at least 80%, 85%, 90%, 95%, or 97% or more.

[0228] Generally binning or competitive binding may be determined using various art-recognized techniques, such as, for example, immunoassays such as western blots, radioimmunoassays, enzyme linked immunosorbent assay (ELISA), “sandwich” immunoassays, immunoprecipitation assays, precipitin reactions, gel diffusion precipitin reactions, immunodiffusion assays, agglutination assays, complement-fixation assays, immunoradiometric assays, fluorescent immunoassays and protein A immunoassays. Such immunoassays are routine and well known in the art (see, Ausubel et al, eds, (1994) Current Protocols in Molecular Biology, Vol. 1, John Wiley & Sons, Inc., New York). Additionally, cross-blocking assays may be used (see, for example, WO 2003/48731; and Harlow et al. (1988) Antibodies, A Laboratory Manual, Cold Spring Harbor Laboratory, Ed Harlow and David Lane).

[0229] Other technologies used to determine competitive inhibition (and hence “bins”), include: surface plasmon resonance using, for example, the BIAcore™ 2000 system (GE Healthcare); bio-layer interferometry using, for example, a ForteBio® Octet RED (ForteBio); or flow cytometry bead arrays using, for example, a FACSCanto II (BD Biosciences) or a multiplex LUMINEX™ detection assay (Luminex).

[0230] Luminex is a bead-based immunoassay platform that enables large scale multiplexed antibody pairing. The assay compares the simultaneous binding patterns of antibody pairs to the target antigen. One antibody of the pair (capture mAb) is bound to Luminex beads, wherein each capture mAb is bound to a bead of a different color. The other antibody (detector mAb) is bound to a fluorescent signal (e.g. phycoerythrin (PE)). The assay analyzes the simultaneous binding (pairing) of antibodies to an antigen and groups together antibodies with similar pairing profiles. Similar profiles of a detector mAb and a capture mAb indicates that the two antibodies bind to the same or closely related epitopes. In one embodiment, pairing profiles can be determined using Pearson correlation coefficients to identify the antibodies which most closely correlate to any particular antibody on the panel of antibodies that are tested. In embodiments a test/detector mAb will be determined to be in the same bin as a reference/capture mAb if the Pearson's correlation coefficient of the antibody pair is at least 0.9. In other embodiments the Pearson's correlation coefficient is at least 0.8, 0.85, 0.87 or 0.89. In further embodiments, the Pearson's correlation coefficient is at least 0.91, 0.92, 0.93, 0.94, 0.95, 0.96, 0.97, 0.98, 0.99 or 1. Other methods of analyzing the data obtained from the Luminex assay are described in U.S. Pat. No. 8,568,992. The ability of Luminex to analyze 100 different types of beads (or more) simultaneously provides almost unlimited antigen and/or antibody surfaces, resulting in improved throughput and resolution in antibody epitope profiling over a biosensor assay (Miller, et al., 2011, PMID: 21223970).

[0231] Similarly binning techniques comprising surface plasmon resonance are compatible with the instant invention. As used herein “surface plasmon resonance,” refers to an optical phenomenon that allows for the analysis of real-time specific interactions by detection of alterations in protein concentrations within a biosensor matrix. Using commercially available equipment such as the BIAcore™ 2000 system it may readily be determined if selected antibodies compete with each other for binding to a defined antigen.

[0232] In other embodiments, a technique that can be used to determine whether a test antibody “competes” for binding with a reference antibody is “bio-layer interferometry”, an optical analytical technique that analyzes the interference pattern of white light reflected from two surfaces: a layer of immobilized protein on a biosensor tip, and an internal reference layer. Any change in the number of molecules bound to the biosensor tip causes a shift in the interference pattern that can be measured in real-time. Such biolayer interferometry assays may be conducted using a ForteBio® Octet RED machine as follows. A reference antibody (Ab1) is captured onto an anti-mouse capture chip, a high concentration of non-binding antibody is then used to block the chip and a baseline is collected. Monomeric, recombinant target protein is then captured by the specific antibody (Ab1) and the tip is dipped into a well with either the same antibody (Ab1) as a control or into a well with a different test antibody (Ab2). If no further binding occurs, as determined by comparing binding levels with the control Ab1, then Ab1 and Ab2 are determined to be “competing” antibodies. If additional binding is observed with Ab2, then Ab1 and Ab2 are determined not to compete with each other. This process can be expanded to screen large libraries of unique antibodies using a full row of antibodies in a 96-well plate representing unique bins. In embodiments a test antibody will compete with a reference antibody if the reference antibody inhibits specific binding of the test antibody to a common antigen by at least 40%, 45%, 50%, 55%, 60%, 65%, 70% or 75%. In other embodiments, binding is inhibited by at least 80%, 85%, 90%, 95%, or 97% or more.

[0233] Once a bin, encompassing a group of competing antibodies, has been defined further characterization can be carried out to determine the specific domain or epitope on the antigen to which that group of antibodies binds. Domain-level epitope mapping may be performed using a modification of the protocol described by Cochran et al., 2004, PMID: 15099763. Fine epitope mapping is the process of determining the specific amino acids on the antigen that comprise the epitope of a determinant to which the antibody binds.

[0234] In certain embodiments fine epitope mapping can be performed using phage or yeast display. Other compatible epitope mapping techniques include alanine scanning mutants, peptide blots (Reineke, 2004, PMID: 14970513), or peptide cleavage analysis. In addition, methods such as epitope excision, epitope extraction and chemical modification of antigens can be employed (Tomer, 2000, PMID: 10752610) using enzymes such as proteolytic enzymes (e.g., trypsin, endoproteinase Glu-C, endoproteinase Asp-N, chymotrypsin, etc.); chemical agents such as succinimidyl esters and their derivatives, primary amine-containing compounds, hydrazines and carbohydrazines, free amino acids, etc. In another embodiment Modification-Assisted Profiling, also known as Antigen Structure-based Antibody Profiling (ASAP) can be used to categorize large numbers of monoclonal antibodies directed against the same antigen according to the similarities of the binding profile of each antibody to chemically or enzymatically modified antigen surfaces (U.S.P.N. 2004/0101920).

[0235] Once a desired epitope on an antigen is determined, it is possible to generate additional antibodies to that epitope, e.g., by immunizing with a peptide comprising the selected epitope using techniques described herein.

### VI. Antibody Conjugates

[0236] In some embodiments the antibodies of the invention may be conjugated with pharmaceutically active or diagnostic moieties to form an “antibody drug conjugate” (ADC) or “antibody conjugate”. The term “conjugate” is used broadly and means the covalent or non-covalent association of any pharmaceutically active or diagnostic moiety with an antibody of the instant invention regardless of the method of association. In certain embodiments the association is effected through a lysine or cysteine residue of the antibody. In some embodiments the pharmaceutically active or diagnostic moieties may be conjugated to the antibody via one or more site-specific free cysteine(s). The disclosed ADCs may be used for therapeutic and diagnostic purposes.

[0237] It will be appreciated that the ADCs of the instant invention may be used to selectively deliver predetermined warheads to the target location (e.g., tumorigenic cells and/or cells expressing DLL3). As set forth herein the terms “drug” or “warhead” may be used interchangeably and will mean any biologically active (e.g., a pharmaceutically active compound or therapeutic moiety) or detectable molecule or compound that has a physiological effect or reporter function when introduced into a subject. For the avoidance of doubt such warheads include the anti-cancer agents or cytotoxins as described below. A “payload” may comprise a drug or warhead in combination with an optional linker compound (e.g., a therapeutic payload) that preferably provides a relatively stable pharmaceutical complex until the ADC reaches the target. By way of example the warhead or drug on the conjugate may comprise peptides, proteins or prodrugs which are metabolized to an active agent in vivo, polymers, nucleic acid molecules, small molecules, binding agents, mimetic agents, synthetic drugs, inorganic molecules, organic molecules and radioisotopes. In certain embodiments the drug or warhead will be covalently conjugated to the antibody through a linker. In other embodiments (e.g., a radioisotope) the drug or warhead will be directly conjugated to, or incorporated in, the antibody.

[0238] In preferred embodiments the disclosed ADCs will direct the bound payload (e.g., drug linker) to the target site in a relatively unreactive, non-toxic state before releasing and activating the warhead (e.g., PBDS 1-5 as disclosed herein). This targeted release of the warhead is preferably achieved through stable conjugation of the payloads (e.g., via one or more cysteines or lysines on the antibody) and relatively homogeneous composition of the ADC preparations which minimize over-conjugated toxic ADC species. Coupled with drug linkers that are designed to largely release the warhead upon delivery to the tumor site, the conjugates of the instant invention can substantially reduce undesirable non-specific toxicity. This advantageously provides for relatively high levels of the active cytotoxin at the tumor site while minimizing exposure of non-targeted cells and tissue thereby providing an enhanced therapeutic index.

[0239] It will be appreciated that, while some embodiments of the invention comprise payloads incorporating therapeutic moieties (e.g., cytotoxins), other payloads incorporating diagnostic agents and biocompatible modifiers may benefit from the targeted delivery provided by the disclosed conjugates. Accordingly, any disclosure directed to exemplary therapeutic payloads is also applicable to payloads comprising diagnostic agents or biocompatible modifiers as discussed herein unless otherwise dictated by context. The selected payload may be covalently or non-covalently linked to the antibody and exhibit various stoichiometric molar ratios depending, at least in part, on the method used to effect the conjugation.

[0240] Conjugates of the instant invention may be generally represented by the formula:

Ab-[L-D]n or a pharmaceutically acceptable salt thereof wherein:
[0241] a) Ab comprises an anti-DLL3 antibody;
[0242] b) L comprises an optional linker;
[0243] c) D comprises a drug; and
[0244] d) n is an integer from about 1 to about 20.

[0245] Those of skill in the art will appreciate that conjugates according to the aforementioned formula may be fabricated using a number of different linkers and drugs and that conjugation methodology will vary depending on the selection of components. As such, any drug or drug linker compound that associates with a reactive residue (e.g., cysteine or lysine) of the disclosed antibodies are compatible with the teachings herein. Similarly, any reaction conditions that allow for conjugation (including site-specific conjugation) of the selected drug to an antibody are within the scope of the present invention. Notwithstanding the foregoing, some preferred embodiments of the instant invention comprise selective conjugation of the drug or drug linker to free cysteines using stabilization agents in combination with mild reducing agents as described herein. Such reaction conditions tend to provide more homogeneous preparations with less non-specific conjugation and contaminants and correspondingly less toxicity.

[0246] A. Payloads and Warheads

[0247] 1. Therapeutic Agents

[0248] As discussed the antibodies of the invention may be conjugated, linked or fused to or otherwise associated with any pharmaceutically active compound comprising a therapeutic moiety or a drug such as an anti-cancer agent including, but not limited to, cytotoxic agents (or cytotoxins), cytostatic agents, anti-angiogenic agents, debulking agents, chemotherapeutic agents, radiotherapeutic agents, targeted anti-cancer agents, biological response modifiers, cancer vaccines, cytokines, hormone therapies, anti-metastatic agents and immunotherapeutic agents.

[0249] Exemplary anti-cancer agents or cytotoxins (including homologs and derivatives thereof) comprise 1-dehydrotestosterone, anthramycins, actinomycin D, bleomycin, calicheamicins (including n-acetyl calicheamicin), colchicin, cyclophosphamide, cytochalasin B, dactinomycin (formerly actinomycin), dihydroxy anthracin, dione, duocarmycin, emetine, epirubicin, ethidium bromide, etoposide, glucocorticoids, gramicidin D, lidocaine, maytansinoids such as DM-1 and DM-4 (Immunogen), benzodiazepine derivatives (Immunogen), mithramycin, mitomycin, mitoxantrone, paclitaxel, procaine, propranolol, puromycin, tenoposide, tetracaine and pharmaceutically acceptable salts or solvates, acids or derivatives of any of the above.

[0250] Additional compatible cytotoxins comprise dolastatins and auristatins, including monomethyl auristatin E (MMAE) and monomethyl auristatin F (MMAF) (Seattle Genetics), amanitins such as alpha-amanitin, beta-amanitin, gamma-amanitin or epsilon-amanitin (Heidelberg Pharma), DNA minor groove binding agents such as duocarmycin derivatives (Syntarga), alkylating agents such as modified or dimeric pyrrolobenzodiazepines (PBD), mechlorethamine, thioepa, chlorambucil, melphalan, carmustine (BCNU), lomustine (CCNU), cyclothosphamide, busulfan, dibromomannitol, streptozotocin, mitomycin C and cisdichlorodiamine platinum (II) (DDP) cisplatin, splicing inhibitors such as meayamycin analogs or derivatives (e.g., FR901464 as set forth in U.S. Pat. No. 7,825,267), tubular binding agents such as epothilone analogs and tubulysins, paclitaxel and DNA damaging agents such as calicheamicins and esperamicins, antimetabolites such as methotrexate, 6-mercaptopurine, 6-thioguanine, cytarabine, and 5-fluorouracil decarbazine, anti-mitotic agents such as vinblastine and vincristine and anthracyclines such as daunorubicin (formerly daunomycin) and doxorubicin and pharmaceutically acceptable salts or solvates, acids or derivatives of any of the above.

[0251] In selected embodiments the antibodies of the instant invention may be associated with anti-CD3 binding molecules to recruit cytotoxic T-cells and have them target tumorigenic cells (BiTE technology; see e.g., Fuhrmann et. al. (2010) Annual Meeting of AACR Abstract No. 5625).

[0252] In further embodiments ADCs of the invention may comprise cytotoxins comprising therapeutic radioisotopes conjugated using appropriate linkers. Exemplary radioisotopes that may be compatible with such embodiments include, but are not limited to, iodine (¹³¹I, ¹²⁵I, ¹²³I, ¹²¹I,), carbon (¹⁴C), copper (⁶²Cu, ⁶⁴Cu, ⁶⁷Cu), sulfur (³⁵S), radium (²²³R), tritium (³H), indium (¹¹⁵In, ¹¹³In, ¹¹²In, ¹¹¹In,), bismuth (²¹²Bi, ²¹³Bi), technetium (⁹⁹Tc), thallium (²⁰¹Ti), gallium (⁶⁸Ga, ⁶⁷Ga), palladium (¹⁰³Pd), molybdenum (⁹⁹Mo), xenon (¹³³Xe), fluorine (¹⁸F), ¹⁵³Sm, ¹⁷⁷Lu, ¹⁵⁹Gd, ¹⁴⁹Pm, ¹⁴⁰La, ¹⁷⁵Yb, ¹⁶⁶Ho, ⁹⁰Y, ⁴⁷Sc, ¹⁸⁶Re, ¹⁸⁸Re, ¹⁴²Pr, ¹⁰⁵Rh, ⁹⁷Ru, ⁶⁸Ge, ⁵⁷Co, ⁶⁵Zn, ⁸⁵Sr, ³²P, ¹⁵³Gd, ¹⁶⁹Yb, ⁵¹Cr, ⁵⁴Mn, ⁷⁵Se, ¹¹³Sn, ¹¹⁷Sn, ⁷⁶Br, ²¹¹At and ²²⁵Ac. Other radionuclides are also available as diagnostic and therapeutic agents, especially those in the energy range of 60 to 4,000 keV.

[0253] In other selected embodiments the ADCs of the instant invention will be conjugated to a cytotoxic benzodiazepine derivative warhead. Compatible benzodiazepine derivatives (and optional linkers) that may be conjugated to the disclosed antibodies are described, for example, in U.S. Pat. No. 8,426,402 and PCT filings WO2012/128868 and WO2014/031566. As with PBDs, compatible benzodiazepine derivatives are believed to bind in the minor grove of DNA and inhibit nucleic acid synthesis. Such compounds reportedly have potent antitumor properties and, as such, are particularly suitable for use in the ADCs of the instant invention.

[0254] In some embodiments, the ADCs of the invention may comprise PBDs, and pharmaceutically acceptable salts or solvates, acids or derivatives thereof, as warheads. PBDs are alkylating agents that exert antitumor activity by covalently binding to DNA in the minor groove and inhibiting nucleic acid synthesis. PBDs have been shown to have potent antitumor properties while exhibiting minimal bone marrow depression. PBDs compatible with the invention may be linked to an antibody using several types of linkers (e.g., a peptidyl linker comprising a maleimido moiety with a free sulfhydryl), and in certain embodiments are dimeric in form (i.e., PBD dimers). Compatible PBDs (and optional linkers) that may be conjugated to the disclosed antibodies are described, for example, in U.S. Pat. Nos. 6,362,331, 7,049,311, 7,189,710, 7,429,658, 7,407,951, 7,741,319, 7,557,099, 8,034,808, 8,163,736, 2011/0256157 and PCT filings WO2011/130613, WO2011/128650, WO2011/130616, WO2014/057073 and WO2014/057074. Examples of PBD compounds compatible with the instant invention are discussed in more detail immediately below.

[0255] With regard to the instant invention PBDs have been shown to have potent antitumor properties while exhibiting minimal bone marrow depression. PBDs compatible with the present invention may be linked to the DLL3 targeting agent using any one of several types of linker (e.g., a peptidyl linker comprising a maleimido moiety with a free sulflydryl) and, in certain embodiments are dimeric in form (i.e., PBD dimers). PBDs are of the general structure:

[chemical structure]

[0256] They differ in the number, type and position of substituents, in both their aromatic A rings and pyrrolo C rings, and in the degree of saturation of the C ring. In the B-ring there is either an imine (N═C), a carbinolamine (NH—CH(OH)), or a carbinolamine methyl ether (NH—CH(OMe)) at the N10-C11 position which is the electrophilic center responsible for alkylating DNA. All of the known natural products have an (S)-configuration at the chiral C11a position which provides them with a right-handed twist when viewed from the C ring towards the A ring. This gives them the appropriate three-dimensional shape for isohelicity with the minor groove of B-form DNA, leading to a snug fit at the binding site (Kohn, In Antibiotics III. Springer-Verlag, New York, pp. 3-11 (1975); Hurley and Needham-VanDevanter, Acc. Chem. Res., 19, 230-237 (1986)). Their ability to form an adduct in the minor groove, enables them to interfere with DNA processing, hence their use as cytotoxic agents. As alluded to above, in order to increase their potency PBDs are often used in a dimeric form which may be conjugated to anti-DLL3 antibodies as described herein.

[0257] In particularly preferred embodiments compatible PBDs that may be conjugated to the disclosed modulators are described, in U.S.P.N. 2011/0256157. In this disclosure, PBD dimers, i.e. those comprising two PBD moieties may be preferred. Thus, preferred conjugates of the present invention are those having the formula (AB) or (AC):

[chemical structure]

wherein:

[0258] the dotted lines indicate the optional presence of a double bond between C1 and C2 or C2 and C3;

[0259] R² is independently selected from H, OH, ═O, ═CH₂, CN, R, OR, ═CH—R^{D}, ═C(R^{D})₂, O—SO₂—R, CO₂R and COR, and optionally further selected from halo or dihalo;

[0260] where R^{D} is independently selected from R, CO₂R, COR, CHO, CO₂H, and halo;

[0261] R⁶ and R⁹ are independently selected from H, R, OH, OR, SH, SR, NH₂, NHR, NRR′, NO₂, Me₃Sn and halo;

[0262] R⁷ is independently selected from H, R, OH, OR, SH, SR, NH₂, NHR, NRR′, NO₂, Me₃Sn and halo;

[0263] R¹⁰ is a linker connected to a DLL3 antibody or fragment or derivative thereof, as described herein;

[0264] Q is independently selected from O, S and NH;

[0265] R¹¹ is either H, or R or, where Q is O, R¹¹ may be SO₃M, where M is a metal cation;

[0266] X is selected from O, S, or N(H) and in selected embodiments comprises O;

[0267] R″ is a C₃₋₁₂ alkylene group, which chain may be interrupted by one or more heteroatoms (e.g., O, S, N(H), NMe and/or aromatic rings, e.g. benzene or pyridine, which rings are optionally substituted);

[0268] R and R′ are each independently selected from optionally substituted C₁₋₁₂ alkyl, C₃₋₂₀ heterocyclyl and C₅₋₂₀ aryl groups, and optionally in relation to the group NRR′, R and R′ together with the nitrogen atom to which they are attached form an optionally substituted 4-, 5-, 6- or 7-membered heterocyclic ring; and

[0269] wherein R^{2″}, R^{6″}, R^{7″}, R^{9″}, X″, Q″ and R^{11″} (where present) are as defined according to R², R⁶, R⁷, R⁹, X, Q and R¹¹ respectively, and R^{C} is a capping group.

[0270] Selected embodiments comprising the aforementioned structures are described in more detail immediately below.

### Double Bond

[0271] In one embodiment, there is no double bond present between C1 and C2, and C2 and C3.

[0272] In one embodiment, the dotted lines indicate the optional presence of a double bond between C2 and C3, as shown below:

[chemical structure]

[0273] In one embodiment, a double bond is present between C2 and C3 when R² is C₅₋₂₀ aryl or C₁₋₁₂ alkyl. In a preferred embodiment R² comprises a methyl group.

[0274] In one embodiment, the dotted lines indicate the optional presence of a double bond between C1 and C2, as shown below:

[chemical structure]

[0275] In one embodiment, a double bond is present between C1 and C2 when R² is C₅₋₂₀ aryl or C₁₋₁₂ alkyl. In a preferred embodiment R² comprises a methyl group.

### R²

[0276] In one embodiment, R² is independently selected from H, OH, ═O, ═CH₂, CN, R, OR, ═CH—R^{D}, ═C(R^{D})₂, O—SO₂—R, CO₂R and COR, and optionally further selected from halo or dihalo.

[0277] In one embodiment, R² is independently selected from H, OH, ═O, ═CH₂, CN, R, OR, ═CH—R^{D}, ═C(R^{D})₂, O—SO₂—R, CO₂R and COR.

[0278] In one embodiment, R² is independently selected from H, ═O, ═CH₂, R, ═CH—R^{D}, and ═C(R^{D})₂.

[0279] In one embodiment, R² is independently H.

[0280] In one embodiment R² is independently R wherein R comprises CH₃.

[0281] In one embodiment, R² is independently ═O.

[0282] In one embodiment, R² is independently ═CH₂.

[0283] In one embodiment, R² is independently ═CH—R^{D}. Within the PBD compound, the group ═CH—R^{D} may have either configuration shown below:

[chemical structure]

[0284] In one embodiment, the configuration is configuration (I).

[0285] In one embodiment, R² is independently ═C(R^{D})₂.

[0286] In one embodiment, R² is independently ═CF₂.

[0287] In one embodiment, R² is independently R.

[0288] In one embodiment, R² is independently optionally substituted C₅₋₂₀ aryl.

[0289] In one embodiment, R² is independently optionally substituted C₁₋₁₂ alkyl.

[0290] In one embodiment, R² is independently optionally substituted C₅₋₂₀ aryl.

[0291] In one embodiment, R² is independently optionally substituted C₅₋₇ aryl.

[0292] In one embodiment, R² is independently optionally substituted C₈₋₁₀ aryl.

[0293] In one embodiment, R² is independently optionally substituted phenyl.

[0294] In one embodiment. R² is independently optionally substituted napthyl.

[0295] In one embodiment, R² is independently optionally substituted pyridyl.

[0296] In one embodiment, R² is independently optionally substituted quinolinyl or isoquinolinyl.

[0297] In one embodiment, R² bears one to three substituent groups, with 1 and 2 being more preferred, and singly substituted groups being most preferred. The substituents may be any position.

[0298] Where R² is a C₅₋₇ aryl group, a single substituent is preferably on a ring atom that is not adjacent the bond to the remainder of the compound, i.e. it is preferably β or γ to the bond to the remainder of the compound. Therefore, where the C₅₋₇ aryl group is phenyl, the substituent is preferably in the meta- or para-positions, and more preferably is in the para-position.

[0299] In one embodiment, R² is selected from:

[chemical structure]

[0300] where the asterisk indicates the point of attachment.

[0301] Where R² is a C₈₋₁₀ aryl group, for example quinolinyl or isoquinolinyl, it may bear any number of substituents at any position of the quinoline or isoquinoline rings. In some embodiments, it bears one, two or three substituents, and these may be on either the proximal and distal rings or both (if more than one substituent).

[0302] In one embodiment, where R² is optionally substituted, the substituents are selected from those substituents given in the substituent section below.

[0303] Where R is optionally substituted, the substituents are preferably selected from:

[0304] Halo, Hydroxyl, Ether, Formyl, Acyl, Carboxy, Ester, Acyloxy, Amino, Amido, Acylamido, Aminocarbonyloxy, Ureido, Nitro, Cyano and Thioether.

[0305] In one embodiment, where R or R² is optionally substituted, the substituents are selected from the group consisting of R, OR, SR, NRR′, NO₂, halo, CO₂R, COR, CONH₂, CONHR, and CONRR′.

[0306] Where R² is C₁₋₁₂ alkyl, the optional substituent may additionally include C₃₋₂₀ heterocyclyl and C₅₋₂₀ aryl groups.

[0307] Where R² is C₃₋₂₀ heterocyclyl, the optional substituent may additionally include C₁₋₁₂ alkyl and C₅₋₂₀ aryl groups.

[0308] Where R² is C₅₋₂₀ aryl groups, the optional substituent may additionally include C₃₋₂₀ heterocyclyl and C₁₋₁₂ alkyl groups.

[0309] It is understood that the term “alkyl” encompasses the sub-classes alkenyl and alkynyl as well as cycloalkyl. Thus, where R² is optionally substituted C₁₋₁₂ alkyl, it is understood that the alkyl group optionally contains one or more carbon-carbon double or triple bonds, which may form part of a conjugated system. In one embodiment, the optionally substituted C₁₋₁₂ alkyl group contains at least one carbon-carbon double or triple bond, and this bond is conjugated with a double bond present between C1 and C2, or C2 and C3. In one embodiment, the C₁₋₁₂ alkyl group is a group selected from saturated C₁₋₁₂ alkyl, C₂₋₁₂ alkenyl, C₂₋₁₂ alkynyl and C₃₋₁₂ cycloalkyl.

[0310] If a substituent on R² is halo, it is preferably F or C1, more preferably C1.

[0311] If a substituent on R² is ether, it may in some embodiments be an alkoxy group, for example, a C₁₋₇ alkoxy group (e.g. methoxy, ethoxy) or it may in some embodiments be a C₅₋₇ aryloxy group (e.g phenoxy, pyridyloxy, furanyloxy).

[0312] If a substituent on R² is C₁₋₇ alkyl, it may preferably be a C₁₋₄ alkyl group (e.g. methyl, ethyl, propyl, butyl).

[0313] If a substituent on R² is C₃₋₇ heterocyclyl, it may in some embodiments be C₆ nitrogen containing heterocyclyl group, e.g. morpholino, thiomorpholino, piperidinyl, piperazinyl. These groups may be bound to the rest of the PBD moiety via the nitrogen atom. These groups may be further substituted, for example, by C₁₋₄ alkyl groups.

[0314] If a substituent on R² is bis-oxy-C₁₋₃ alkylene, this is preferably bis-oxy-methylene or bis-oxy-ethylene.

[0315] Particularly preferred substituents for R² include methoxy, ethoxy, fluoro, chloro, cyano, bis-oxy-methylene, methyl-piperazinyl, morpholino and methyl-thienyl.

[0316] Particularly preferred substituted R² groups include, but are not limited to, 4-methoxy-phenyl, 3-methoxyphenyl, 4-ethoxy-phenyl, 3-ethoxy-phenyl, 4-fluoro-phenyl, 4-chloro-phenyl, 3,4-bisoxymethylene-phenyl, 4-methylthienyl, 4-cyanophenyl, 4-phenoxyphenyl, quinolin-3-yl and quinolin-6-yl, isoquinolin-3-yl and isoquinolin-6-yl, 2-thienyl, 2-furanyl, methoxynaphthyl, and naphthyl.

[0317] In one embodiment, R² is halo or dihalo. In one embodiment, R² is —F or —F₂, which substituents are illustrated below as (III) and (IV) respectively:

[chemical structure]

### R^{D}

[0318] In one embodiment, R^{D} is independently selected from R, CO₂R, COR, CHO, CO₂H, and halo.

[0319] In one embodiment, R^{D} is independently R.

[0320] In one embodiment, R^{D} is independently halo.

### R⁶

[0321] In one embodiment, R⁶ is independently selected from H, R, OH, OR, SH, SR, NH₂, NHR, NRR′, NO₂, Me₃Sn— and Halo.

[0322] In one embodiment, R⁶ is independently selected from H, OH, OR, SH, NH₂, NO₂ and Halo.

[0323] In one embodiment, R⁶ is independently selected from H and Halo.

[0324] In one embodiment, R⁶ is independently H.

[0325] In one embodiment, R⁶ and R⁷ together form a group —O—(CH₂)ₚ—O—, where p is 1 or 2.

### R⁷

[0326] R⁷ is independently selected from H, R, OH, OR, SH, SR, NH₂, NHR, NRR′, NO₂, Me₃Sn and halo.

[0327] In one embodiment, R⁷ is independently OR.

[0328] In one embodiment, R⁷ is independently OR^{7A}, where R^{7A} is independently optionally substituted C₁₋₆ alkyl.

[0329] In one embodiment, R^{7A} is independently optionally substituted saturated C₁₋₆ alkyl.

[0330] In one embodiment, R^{7A} is independently optionally substituted C₂₋₄ alkenyl.

[0331] In one embodiment, R^{7A} is independently Me.

[0332] In one embodiment, R^{7A} is independently CH₂Ph.

[0333] In one embodiment, R^{7A} is independently allyl.

[0334] In one embodiment, the compound is a dimer where the R⁷ groups of each monomer form together a dimer bridge having the formula X—R″—X linking the monomers. R⁹

[0335] In one embodiment, R⁹ is independently selected from H, R, OH, OR, SH, SR, NH₂, NHR, NRR′, NO₂, Me₃Sn— and Halo.

[0336] In one embodiment, R⁹ is independently H.

[0337] In one embodiment, R⁹ is independently R or OR.

### R¹⁰

[0338] Preferably compatible linkers such as those described herein attach the DLL3 antibody to the PBD drug moiety through covalent bond(s) at the R¹⁰ position (i.e., N10).

### Q

[0339] In certain embodiments Q is independently selected from O, S and NH.

[0340] In one embodiment, Q is independently O.

[0341] In one embodiment, Q is independently S.

[0342] In one embodiment, Q is independently NH.

### R¹¹

[0343] In selected embodiments R¹¹ is either H, or R or, where Q is O, may be SO₃M where M is a metal cation. The cation may be Na⁺.

[0344] In certain embodiments R¹¹ is H.

[0345] In certain embodiments R¹¹ is R.

[0346] In certain embodiments, where Q is O, R¹¹ may be SO₃M where M is a metal cation. The cation may be Na⁺.

[0347] In certain embodiments where Q is O, R¹¹ is H.

[0348] In certain embodiments where Q is O, R¹¹ is R.

### X

[0349] In one embodiment, X is selected from O, S, or N(H).

[0350] Preferably, X is O.

### R″

[0351] R″ is a C₃₋₁₂ alkylene group, which chain may be interrupted by one or more heteroatoms, e.g. O, S, N(H), NMe and/or aromatic rings, e.g. benzene or pyridine, which rings are optionally substituted.

[0352] In one embodiment, R″ is a C₃₋₁₂ alkylene group, which chain may be interrupted by one or more heteroatoms and/or aromatic rings, e.g. benzene or pyridine.

[0353] In one embodiment, the alkylene group is optionally interrupted by one or more heteroatoms selected from O, S, and NMe and/or aromatic rings, which rings are optionally substituted.

[0354] In one embodiment, the aromatic ring is a C₅₋₂₀ arylene group, where arylene pertains to a divalent moiety obtained by removing two hydrogen atoms from two aromatic ring atoms of an aromatic compound, which moiety has from 5 to 20 ring atoms.

[0355] In one embodiment, R″ is a C₃₋₁₂ alkylene group, which chain may be interrupted by one or more heteroatoms, e.g. O, S, N(H), NMe and/or aromatic rings, e.g. benzene or pyridine, which rings are optionally substituted by NH₂.

[0356] In one embodiment, R″ is a C₃₋₁₂ alkylene group.

[0357] In one embodiment, R″ is selected from a C₃, C₅, C₇, C₉ and a C₁₁ alkylene group.

[0358] In one embodiment, R″ is selected from a C₃, C₅ and a C₇ alkylene group.

[0359] In one embodiment, R″ is selected from a C₃ and a C₅ alkylene group.

[0360] In one embodiment, R″ is a C₃ alkylene group.

[0361] In one embodiment, R″ is a C₅ alkylene group.

[0362] The alkylene groups listed above may be optionally interrupted by one or more heteroatoms and/or aromatic rings, e.g. benzene or pyridine, which rings are optionally substituted.

[0363] The alkylene groups listed above may be optionally interrupted by one or more heteroatoms and/or aromatic rings, e.g. benzene or pyridine.

[0364] The alkylene groups listed above may be unsubstituted linear aliphatic alkylene groups.

### R and R′

[0365] In one embodiment, R is independently selected from optionally substituted C₁₋₁₂ alkyl, C₃₋₂₀ heterocyclyl and C₅₋₂₀ aryl groups.

[0366] In one embodiment, R is independently optionally substituted C₁₋₁₂ alkyl.

[0367] In one embodiment, R is independently optionally substituted C₃₋₂₀ heterocyclyl.

[0368] In one embodiment, R is independently optionally substituted C₅₋₂₀ aryl.

[0369] Described above in relation to R² are various embodiments relating to preferred alkyl and aryl groups and the identity and number of optional substituents. The preferences set out for R² as it applies to R are applicable, where appropriate, to all other groups R, for examples where R⁶, R⁷, R⁸ or R⁹ is R.

[0370] The preferences for R apply also to R′.

[0371] In some embodiments of the invention there is provided a compound having a substituent group —NRR′. In one embodiment, R and R′ together with the nitrogen atom to which they are attached form an optionally substituted 4-, 5-, 6- or 7-membered heterocyclic ring. The ring may contain a further heteroatom, for example N, O or S.

[0372] In one embodiment, the heterocyclic ring is itself substituted with a group R. Where a further N heteroatom is present, the substituent may be on the N heteroatom.

[0373] In addition to the aforementioned PBDs certain exemplary dimeric PBDs have been shown to be particularly active and may be used in conjunction with the instant invention. To this end antibody drug conjugates (i.e., ADCs 1-6 as disclosed herein) of the instant invention may comprise a PBD compound set forth immediately below as PBD 1-5. Note that PBDs 1-5 below comprise the cytotoxic warhead released following separation of a linker such as those described in more detail herein. The synthesis of each of PBD 1-5 as a component of drug linker compounds is presented in great detail in WO 2014/130879 which is hereby incorporated by reference as to such synthesis. In view of WO 2014/130879 cytotoxic compounds that may comprise selected warheads of the ADCs of the present invention could readily be generated and employed as set forth herein. Accordingly, selected PBD compounds that may be released from the disclosed ADCs upon separation from a linker are set forth immediately below:

[chemical structure]

[0374] It will be appreciated that each of the aforementioned dimeric PBD warheads will preferably be released upon internalization by the target cell and destruction of the linker. As described in more detail below, certain linkers will comprise cleavable linkers which may incorporate a self-immolation moiety that allows release of the active PBD warhead without retention of any part of the linker. Upon release the PBD warhead will then bind and cross-link with the target cell's DNA. Such binding reportedly blocks division of the target cancer cell without distorting its DNA helix, thus potentially avoiding the common phenomenon of emergent drug resistance. In other preferred embodiments the warhead may be attached to the DLL3 targeting moiety through a cleavable linker that does not comprise a self-immolating moiety.

[0375] Delivery and release of such compounds at the tumor site(s) may prove clinically effective in treating or managing proliferative disorders in accordance with the instant disclosure. With regard to the compounds it will be appreciated that each of the disclosed PBDs have two sp² centers in each C-ring, which may allow for stronger binding in the minor groove of DNA (and hence greater toxicity), than for compounds with only one sp² center in each C-ring. Thus, when used in DLL3 ADCs as set forth herein the disclosed PBDs may prove to be particularly effective for the treatment of proliferative disorders.

[0376] The foregoing provides exemplary PBD compounds that are compatible with the instant invention and is in no way meant to be limiting as to other PBDs that may be successfully incorporated in anti-DLL3 conjugates according to the teachings herein. Rather, any PBD that may be conjugated to an antibody as described herein and set forth in the Examples below is compatible with the disclosed conjugates and expressly within the metes and bounds of the invention.

[0377] In addition to the aforementioned agents the antibodies of the present invention may also be conjugated to biological response modifiers. In certain embodiments the biological response modifier will comprise interleukin 2, interferons, or various types of colony-stimulating factors (e.g., CSF, GM-CSF, G-CSF).

[0378] More generally, the associated drug moiety can be a polypeptide possessing a desired biological activity. Such proteins may include, for example, a toxin such as abrin, ricin A, Onconase (or another cytotoxic RNase), pseudomonas exotoxin, cholera toxin, diphtheria toxin; an apoptotic agent such as tumor necrosis factor e.g. TNF-α or TNF-β, α-interferon, β-interferon, nerve growth factor, platelet derived growth factor, tissue plasminogen activator, AIM I (WO 97/33899), AIM II (WO 97/34911), Fas Ligand (Takahashi et al., 1994, PMID: 7826947), and VEGI (WO 99/23105), a thrombotic agent, an anti-angiogenic agent, e.g., angiostatin or endostatin, a lymphokine, for example, interleukin-1 (IL-1), interleukin-2 (IL-2), interleukin-6 (IL-6), granulocyte macrophage colony stimulating factor (GM-CSF), and granulocyte colony stimulating factor (G-CSF), or a growth factor e.g., growth hormone (GH).

[0379] 2. Diagnostic or Detection Agents

[0380] In other embodiments, the anti-ASCL1 or anti-DLL3 antibodies of the invention, or fragments or derivatives thereof, are conjugated to a diagnostic or detectable agent, marker or reporter which may be, for example, a biological molecule (e.g., a peptide or nucleotide), a small molecule, fluorophore, or radioisotope. Labeled antibodies can be useful for monitoring the development or progression of a hyperproliferative disorder or as part of a clinical testing procedure to determine the efficacy of a particular therapy including the disclosed antibodies (i.e. theragnostics) or to determine a future course of treatment. Such markers or reporters may also be useful in purifying the selected antibody, for use in antibody analytics (e.g., epitope binding or antibody binning), separating or isolating tumorigenic cells or in preclinical procedures or toxicology studies.

[0381] Such diagnosis, analysis and/or detection can be accomplished by coupling the antibody to detectable substances including, but not limited to, various enzymes comprising for example horseradish peroxidase, alkaline phosphatase, beta-galactosidase, or acetylcholinesterase; prosthetic groups, such as but not limited to streptavidinlbiotin and avidin/biotin; fluorescent materials, such as but not limited to, umbelliferone, fluorescein, fluorescein isothiocynate, rhodamine, dichlorotriazinylamine fluorescein, dansyl chloride or phycoerythrin; luminescent materials, such as but not limited to, luminol; bioluminescent materials, such as but not limited to, luciferase, luciferin, and aequorin; radioactive materials, such as but not limited to iodine (¹³¹I, ¹²⁵I, ¹²³I, ¹²¹I,), carbon (¹⁴C), sulfur (³⁵S), tritium (³H), indium (¹¹⁵In, ¹¹³In, ¹¹²In, ¹¹¹In,), and technetium (⁹⁹Tc), thallium (²⁰¹Ti), gallium (⁶⁸Ga, ⁶⁷Ga), palladium (¹⁰³Pd), molybdenum (⁹⁹Mo), xenon (¹³³Xe), fluorine (¹⁸F), ¹⁵³Sm, ¹⁷⁷Lu, ¹⁵⁹Gd, ¹⁴⁹Pm, ¹⁴⁰La, ¹⁷⁵Yb, ¹⁶⁶Ho, ⁹⁰Y, ⁴⁷Sc, ¹⁸⁶Re, ¹⁸⁸Re, ¹⁴²Pr, ¹⁰⁵Rh ⁹⁷Ru, ⁶⁸Ge, ⁵⁷Co, ⁶⁵Zn, ⁸⁵Sr, ³²P, ⁸⁹Zr, ¹⁵³Gd, ¹⁶⁹Yb, ⁵¹Cr ⁵⁴Mn, ⁷⁵Se, ¹¹³Sn, and ¹¹⁷Tin; positron emitting metals using various positron emission tomographies, non-radioactive paramagnetic metal ions, and molecules that are radiolabeled or conjugated to specific radioisotopes. In such embodiments appropriate detection methodology is well known in the art and readily available from numerous commercial sources.

[0382] In other embodiments the antibodies or fragments thereof can be fused or conjugated to marker sequences or compounds, such as a peptide or fluorophore to facilitate purification or diagnostic or analytic procedures such as immunohistochemistry, bio-layer interferometry, surface plasmon resonance, flow cytometry, competitive ELISA, FACs, etc. In some embodiments, the marker comprises a histidine tag such as that provided by the pQE vector (Qiagen), among others, many of which are commercially available. Other peptide tags useful for purification include, but are not limited to, the hemagglutinin “HA” tag, which corresponds to an epitope derived from the influenza hemagglutinin protein (Wilson et al., 1984, Cell 37:767) and the “flag” tag (U.S. Pat. No. 4,703,004).

[0383] 3. Biocompatible Modifiers

[0384] In selected embodiments the antibodies of the invention may be conjugated with biocompatible modifiers that may be used to adjust, alter, improve or moderate antibody characteristics as desired. For example, antibodies or fusion constructs with increased in vivo half-lives can be generated by attaching relatively high molecular weight polymer molecules such as commercially available polyethylene glycol (PEG) or similar biocompatible polymers. Those skilled in the art will appreciate that PEG may be obtained in many different molecular weights and molecular configurations that can be selected to impart specific properties to the antibody (e.g. the half-life may be tailored). PEG can be attached to antibodies or antibody fragments or derivatives with or without a multifunctional linker either through conjugation of the PEG to the N- or C-terminus of said antibodies or antibody fragments or via epsilon-amino groups present on lysine residues. Linear or branched polymer derivatization that results in minimal loss of biological activity may be used. The degree of conjugation can be closely monitored by SDS-PAGE and mass spectrometry to ensure optimal conjugation of PEG molecules to antibody molecules. Unreacted PEG can be separated from antibody-PEG conjugates by, e.g., size exclusion or ion-exchange chromatography. In a similar manner, the disclosed antibodies can be conjugated to albumin in order to make the antibody or antibody fragment more stable in vivo or have a longer half-life in vivo. The techniques are well known in the art, see e.g., WO 93/15199, WO 93/15200, and WO 01/77137; and EP 0 413, 622. Other biocompatible conjugates are evident to those of ordinary skill and may readily be identified in accordance with the teachings herein.

[0385] B. Linker Compounds

[0386] As indicated above payloads compatible with the instant invention comprise one or more warheads and, optionally, a linker associating the warheads with the antibody targeting agent. Numerous linker compounds can be used to conjugate the antibodies of the invention to the relevant warhead. The linkers merely need to covalently bind with the reactive residue on the antibody (preferably a cysteine or lysine) and the selected drug compound. Accordingly, any linker that reacts with the selected antibody residue and may be used to provide the relatively stable conjugates (site-specific or otherwise) of the instant invention is compatible with the teachings herein.

[0387] Compatible linkers can advantageously bind to reduced cysteines and lysines, which are nucleophilic. Conjugation reactions involving reduced cysteines and lysines include, but are not limited to, thiol-maleimide, thiol-halogeno (acyl halide), thiol-ene, thiol-yne, thiol-vinylsulfone, thiol-bisulfone, thiol-thiosulfonate, thiol-pyridyl disulfide and thiol-parafluoro reactions. As further discussed herein, thiol-maleimide bioconjugation is one of the most widely used approaches due to its fast reaction rates and mild conjugation conditions. One issue with this approach is the possibility of the retro-Michael reaction and loss or transfer of the maleimido-linked payload from the antibody to other proteins in the plasma, such as, for example, human serum albumin. However, in some embodiments the use of selective reduction and site-specific antibodies as set forth herein in the Examples below may be used to stabilize the conjugate and reduce this undesired transfer. Thiol-acyl halide reactions provide bioconjugates that cannot undergo retro-Michael reaction and therefore are more stable. However, the thiol-halide reactions in general have slower reaction rates compared to maleimide-based conjugations and are thus not as efficient in providing undesired drug to antibody ratios. Thiol-pyridyl disulfide reaction is another popular bioconjugation route. The pyridyl disulfide undergoes fast exchange with free thiol resulting in the mixed disulfide and release of pyridine-2-thione. Mixed disulfides can be cleaved in the reductive cell environment releasing the payload. Other approaches gaining more attention in bioconjugation are thiol-vinylsulfone and thiol-bisulfone reactions, each of which are compatible with the teachings herein and expressly included within the scope of the invention.

[0388] In selected embodiments compatible linkers will confer stability on the ADCs in the extracellular environment, prevent aggregation of the ADC molecules and keep the ADC freely soluble in aqueous media and in a monomeric state. Before transport or delivery into a cell, the ADC is preferably stable and remains intact, i.e. the antibody remains linked to the drug moiety. While the linkers are stable outside the target cell they may be designed to be cleaved or degraded at some efficacious rate inside the cell. Accordingly an effective linker will: (i) maintain the specific binding properties of the antibody; (ii) allow intracellular delivery of the conjugate or drug moiety; (iii) remain stable and intact, i.e. not cleaved or degraded, until the conjugate has been delivered or transported to its targeted site; and (iv) maintain a cytotoxic, cell-killing effect or a cytostatic effect of the drug moiety (including, in some cases, any bystander effects). The stability of the ADC may be measured by standard analytical techniques such as HPLC/UPLC, mass spectroscopy, HPLC, and the separation/analysis techniques LC/MS and LC/MS/MS. As set forth above covalent attachment of the antibody and the drug moiety requires the linker to have two reactive functional groups, i.e. bivalency in a reactive sense. Bivalent linker reagents that are useful to attach two or more functional or biologically active moieties, such as MMAE and antibodies are known, and methods have been described to provide resulting conjugates compatible with the teachings herein.

[0389] Linkers compatible with the present invention may broadly be classified as cleavable and non-cleavable linkers. Cleavable linkers, which may include acid-labile linkers (e.g., oximes and hydrozones), protease cleavable linkers and disulfide linkers, are internalized into the target cell and are cleaved in the endosomal-lysosomal pathway inside the cell. Release and activation of the cytotoxin relies on endosome/lysosome acidic compartments that facilitate cleavage of acid-labile chemical linkages such as hydrazone or oxime. If a lysosomal-specific protease cleavage site is engineered into the linker the cytotoxins will be released in proximity to their intracellular targets. Alternatively, linkers containing mixed disulfides provide an approach by which cytotoxic payloads are released intracellularly as they are selectively cleaved in the reducing environment of the cell, but not in the oxygen-rich environment in the bloodstream. By way of contrast, compatible non-cleavable linkers containing amide linked polyethylene glycol or alkyl spacers liberate toxic payloads during lysosomal degradation of the ADC within the target cell. In some respects the selection of linker will depend on the particular drug used in the conjugate, the particular indication and the antibody target.

[0390] Accordingly, certain embodiments of the invention comprise a linker that is cleavable by a cleaving agent that is present in the intracellular environment (e.g., within a lysosome or endosome or caveolae). The linker can be, for example, a peptidyl linker that is cleaved by an intracellular peptidase or protease enzyme, including, but not limited to, a lysosomal or endosomal protease. In some embodiments, the peptidyl linker is at least two amino acids long or at least three amino acids long. Cleaving agents can include cathepsins B and D and plasmin, each of which is known to hydrolyze dipeptide drug derivatives resulting in the release of active drug inside target cells. Exemplary peptidyl linkers that are cleavable by the thiol-dependent protease cathepsin-B are peptides comprising Phe-Leu since cathepsin-B has been found to be highly expressed in cancerous tissue. Other examples of such linkers are described, for example, in U.S. Pat. No. 6,214,345. In specific embodiments, the peptidyl linker cleavable by an intracellular protease is a Val-Cit linker, a Val-Ala linker or a Phe-Lys linker. One advantage of using intracellular proteolytic release of the therapeutic agent is that the agent is typically attenuated when conjugated and the serum stabilities of the conjugates are relatively high.

[0391] In other embodiments, the cleavable linker is pH-sensitive. Typically, the pH-sensitive linker will be hydrolyzable under acidic conditions. For example, an acid-labile linker that is hydrolyzable in the lysosome (e.g., a hydrazone, oxime, semicarbazone, thiosemicarbazone, cis-aconitic amide, orthoester, acetal, ketal, or the like) can be used (See, e.g., U.S. Pat. Nos. 5,122,368; 5,824,805; 5,622,929). Such linkers are relatively stable under neutral pH conditions, such as those in the blood, but are unstable (e.g., cleavable) at below pH 5.5 or 5.0 which is the approximate pH of the lysosome.

[0392] In yet other embodiments, the linker is cleavable under reducing conditions (e.g., a disulfide linker). A variety of disulfide linkers are known in the art, including, for example, those that can be formed using SATA (N-succinimidyl-S-acetylthioacetate), SPDP (N-succinimidyl-3-(2-pyridyldithio)propionate), SPDB (N-succinimidyl-3-(2-pyridyldithio) butyrate) and SMPT (N-succinimidyl-oxycarbonyl-alpha-methyl-alpha-(2-pyridyl-dithio)toluene). In yet other specific embodiments, the linker is a malonate linker (Johnson et al., 1995, Anticancer Res. 15:1387-93), a maleimidobenzoyl linker (Lau et al., 1995, Bioorg-Med-Chem. 3(10):1299-1304), or a 3′-N-amide analog (Lau et al., 1995, Bioorg-Med-Chem. 3(10):1305-12).

[0393] In certain aspects of the invention the selected linker will comprise a compound of the formula:

[chemical structure]

[0394] wherein the asterisk indicates the point of attachment to the drug, CBA (i.e. cell binding agent) comprises the anti-DLL3 antibody, L¹ comprises a linker unit and optionally a cleavable linker unit, A is a connecting group (optionally comprising a spacer) connecting L¹ to a reactive residue on the antibody, L² is preferably a covalent bond and U, which may or may not be present, can comprise all or part of a self-immolative unit that facilitates a clean separation of the linker from the warhead at the tumor site.

[0395] In some embodiments (such as those set forth in U.S.P.N. 2011/0256157) compatible linkers may comprise:

[chemical structure]

[0396] where the asterisk indicates the point of attachment to the drug, CBA (i.e. cell binding agent) comprises an anti-DLL3 antibody, L¹ comprises a linker and optionally a cleavable linker, A is a connecting group (optionally comprising a spacer) connecting L¹ to a reactive residue on the antibody and L² is a covalent bond or together with —OC(═O)— forms a self-immolative moiety.

[0397] It will be appreciated that the nature of L¹ and L², where present, can vary widely. These groups are chosen on the basis of their cleavage characteristics, which may be dictated by the conditions at the site to which the conjugate is delivered. Those linkers that are cleaved by the action of enzymes are preferred, although linkers that are cleavable by changes in pH (e.g. acid or base labile), temperature or upon irradiation (e.g. photolabile) may also be used. Linkers that are cleavable under reducing or oxidizing conditions may also find use in the present invention.

[0398] In certain embodiments L¹ may comprise a contiguous sequence of amino acids. The amino acid sequence may be the target substrate for enzymatic cleavage, thereby allowing release of the drug.

[0399] In one embodiment, L¹ is cleavable by the action of an enzyme. In one embodiment, the enzyme is an esterase or a peptidase.

[0400] In another embodiment L¹ is as a Cathepsin labile linker.

[0401] In one embodiment, L¹ comprises a dipeptide. The dipeptide may be represented as —NH—X₁—X₂—CO—, where —NH— and —CO— represent the N- and C-terminals of the amino acid groups X₁ and X₂ respectively. The amino acids in the dipeptide may be any combination of natural amino acids. Where the linker is a Cathepsin labile linker, the dipeptide may be the site of action for Cathepsin-mediated cleavage.

[0402] Additionally, for those amino acids groups having carboxyl or amino side chain functionality, for example Glu and Lys respectively, CO and NH may represent that side chain functionality.

[0403] In one embodiment, the group —X₁—X₂— in dipeptide, —NH—X₁—X₂—CO—, is selected from: -Phe-Lys-, -Val-Ala-, -Val-Lys-, -Ala-Lys-, -Val-Cit-, -Phe-Cit-, -Leu-Cit-, -Ile-Cit-, -Phe-Arg- and -Trp-Cit- where Cit is citrulline.

[0404] Preferably, the group —X₁—X₂— in dipeptide, —NH—X₁—X₂—CO—, is selected from: -Phe-Lys-, -Val-Ala-, -Val-Lys-, -Ala-Lys-, and -Val-Cit-.

[0405] Most preferably, the group —X₁—X₂— in dipeptide, —NH—X₁—X₂—CO—, is -Phe-Lys- or -Val-Ala- or Val-Cit. In certain selected embodiments the dipeptide will comprise -Val-Ala-.

[0406] In one embodiment, L² is present and together with —C(═O)O— forms a self-immolative linker. In one embodiment, L² is a substrate for enzymatic activity, thereby allowing release of the warhead.

[0407] In one embodiment, where L¹ is cleavable by the action of an enzyme and L² is present, the enzyme cleaves the bond between L¹ and L².

[0408] L¹ and L², where present, may be connected by a bond selected from: —C(═O)NH—, —C(═O)O—, —NHC(═O)—, —OC(═O)—, —OC(═O)O—, —NHC(═O)O—, —OC(═O)NH—, and —NHC(═O)NH—.

[0409] An amino group of L¹ that connects to L² may be the N-terminus of an amino acid or may be derived from an amino group of an amino acid side chain, for example a lysine amino acid side chain.

[0410] A carboxyl group of L¹ that connects to L² may be the C-terminus of an amino acid or may be derived from a carboxyl group of an amino acid side chain, for example a glutamic acid amino acid side chain.

[0411] A hydroxyl group of L¹ that connects to L² may be derived from a hydroxyl group of an amino acid side chain, for example a serine amino acid side chain.

[0412] The term “amino acid side chain” includes those groups found in: (i) naturally occurring amino acids such as alanine, arginine, asparagine, aspartic acid, cysteine, glutamine, glutamic acid, glycine, histidine, isoleucine, leucine, lysine, methionine, phenylalanine, proline, serine, threonine, tryptophan, tyrosine, and valine; (ii) minor amino acids such as ornithine and citrulline; (iii) unnatural amino acids, beta-amino acids, synthetic analogs and derivatives of naturally occurring amino acids; and (iv) all enantiomers, diastereomers, isomerically enriched, isotopically labelled (e.g. ²H, ³H, ¹⁴C, ¹⁵N), protected forms, and racemic mixtures thereof.

[0413] In one embodiment, —C(═O)O— and L² together form the group:

[chemical structure]

[0414] where the asterisk indicates the point of attachment to the drug or cytotoxic agent position, the wavy line indicates the point of attachment to the linker L¹, Y is —N(H)—, —O—, —C(═O)N(H)— or —C(═O)O—, and n is 0 to 3. The phenylene ring is optionally substituted with one, two or three substituents. In one embodiment, the phenylene group is optionally substituted with halo, NO₂, alkyl or hydroxyalkyl.

[0415] In one embodiment, Y is NH.

[0416] In one embodiment, n is 0 or 1. Preferably, n is 0.

[0417] Where Y is NH and n is 0, the self-immolative linker may be referred to as a p-aminobenzylcarbonyl linker (PABC).

[0418] In other embodiments the linker may include a self-immolative linker and the dipeptide together form the group —NH-Val-Cit-CO—NH-PABC-. In other selected embodiments the linker may comprise the group —NH-Val-Ala-CO—NH-PABC-, which is illustrated below:

[chemical structure]

[0419] where the asterisk indicates the point of attachment to the selected cytotoxic moiety, and the wavy line indicates the point of attachment to the remaining portion of the linker (e.g., the spacer-antibody binding segments) which may be conjugated to the antibody. Upon enzymatic cleavage of the dipeptide, the self-immolative linker will allow for clean release of the protected compound (i.e., the cytotoxin) when a remote site is activated, proceeding along the lines shown below:

[chemical structure]

[0420] where the asterisk indicates the point of attachment to the selected cytotoxic moiety and where L* is the activated form of the remaining portion of the linker comprising the now cleaved peptidyl unit. The clean release of the warhead ensures it will maintain the desired toxic activity.

[0421] In one embodiment, A is a covalent bond. Thus, L¹ and the antibody are directly connected. For example, where L¹ comprises a contiguous amino acid sequence, the N-terminus of the sequence may connect directly to the antibody residue.

[0422] In another embodiment, A is a spacer group. Thus, ^{L} and the antibody are indirectly connected.

[0423] In certain embodiments L¹ and A may be connected by a bond selected from: —C(═O)NH—, —C(═O)O—, —NHC(═O)—, —OC(═O)—, —OC(═O)O—, —NHC(═O)O—, —OC(═O)NH—, and —NHC(═O)NH—.

[0424] As will be discussed in more detail below the drug linkers of the instant invention will preferably be linked to reactive thiol nucleophiles on cysteines, including free cysteines. To this end the cysteines of the antibodies may be made reactive for conjugation with linker reagents by treatment with various reducing agent such as DTT or TCEP or mild reducing agents as set forth herein. In other embodiments the drug linkers of the instant invention will preferably be linked to a lysine.

[0425] Preferably, the linker contains an electrophilic functional group for reaction with a nucleophilic functional group on the antibody. Nucleophilic groups on antibodies include, but are not limited to: (i) N-terminal amine groups, (ii) side chain amine groups, e.g. lysine, (iii) side chain thiol groups, e.g. cysteine, and (iv) sugar hydroxyl or amino groups where the antibody is glycosylated. Amine, thiol, and hydroxyl groups are nucleophilic and capable of reacting to form covalent bonds with electrophilic groups on linker moieties and linker reagents including: (i) maleimide groups (ii) activated disulfides, (iii) active esters such as NHS (N-hydroxysuccinimide) esters, HOBt (N-hydroxybenzotriazole) esters, haloformates, and acid halides; (iv) alkyl and benzyl halides such as haloacetamides; and (v) aldehydes, ketones and carboxyl groups.

[0426] Exemplary functional groups compatible with the invention are illustrated immediately below:

[chemical structure]

[0427] In some embodiments the connection between a cysteine (including a free cysteine of a site-specific antibody) and the drug-linker moiety is through a thiol residue and a terminal maleimide group of present on the linker. In such embodiments, the connection between the antibody and the drug-linker may be:

[chemical structure]

[0428] where the asterisk indicates the point of attachment to the remaining portion of drug-linker and the wavy line indicates the point of attachment to the remaining portion of the antibody. In this embodiment, the S atom is preferably derived from a site-specific free cysteine.

[0429] With regard to other compatible linkers the binding moiety may comprise a terminal iodoacetamide that may be reacted with activated residues on the antibody to provide the desired conjugate. In any event one skilled in the art could readily conjugate each of the disclosed drug-linker compounds with a compatible anti-DLL3 antibody (including site-specific antibodies) in view of the instant disclosure.

[0430] In accordance with the instant disclosure the invention provides methods of making compatible antibody drug conjugates comprising conjugating an anti-DLL3 antibody with a drug-linker compound selected from the group consisting of:

[chemical structure]

[chemical structure]

[0431] For the purposes of then instant application DL will be used as an abbreviation for “drug linker” (or linker-drug “L-D” in the formula Ab-[L-D]n) and will comprise drug linkers 1-6 (i.e., DL1, DL2, DL3, DL4 DL5, and DL6) as set forth above. Note that DL1 and DL6 comprise the same warhead and same dipeptide subunit but differ in the connecting group spacer. Accordingly, upon cleavage of the linker both DL1 and DL6 will release PBD 1.

[0432] It will be appreciated that the linker appended terminal maleimido moiety (DL1-DL4 and DL6) or iodoacetamide moiety (DL5) may be conjugated to free sulfhydryl(s) on the selected DLL3 antibody using art-recognized techniques as disclosed herein. Synthetic routes for the aforementioned compounds are set forth in WO2014/130879 which is incorporated herein by reference explicitly for the synthesis of the aforementioned DL compounds while specific methods of conjugating such PBDs linker combinations are set forth in the Examples below.

[0433] Thus, in selected aspects the present invention relates to DLL3 antibodies conjugated to the disclosed DL moieties to provide DLL3 immunoconjugates substantially set forth in ADCs 1-6 immediately below. Accordingly, in certain aspects the invention is directed to an ADC of the formula Ab-[L-D]n comprising a structure selected from the group consisting of:

[chemical structure]

[chemical structure]

[0434] wherein Ab comprises an anti-DLL3 antibody or immunoreactive fragment thereof and n is an integer from 1 to 20. In certain embodiments n will comprise an integer from 1 to 8 and in selected embodiments n will comprise 2 or 4.

[0435] Those of skill in the art will appreciate that the aforementioned ADC structures are defined by the formula Ab-[L-D]n and more than one drug linker molecule as depicted therein may be covalently conjugated to the DLL3 antibody (e.g., n may be an integer from about 1 to about 20). More particularly, as discussed in more detail below it will be appreciated that more than one payload may be conjugated to each antibody and that the schematic representations above must be construed as such. By way of example ADC1 as set forth above may comprise a DLL3 antibody conjugated to 1, 2, 3, 4, 5, 6, 7 or 8 or more payloads and that compositions of such ADCs will generally comprise a mixture of drug loaded species.

[0436] In certain aspects the DLL3 PBD ADCs of the invention will comprise an anti-DLL3 antibody as set forth in the appended Examples or an immunoreactive fragment thereof. In a particular embodiment ADC3 will comprise hSC16.56 (e.g., hSC16.56 PBD1). In such embodiments the ADC will preferably comprise 2 payloads. In other preferred embodiments the DLL3 ADC will comprise ADC1 wherein n is 2.

[0437] C. Conjugation

[0438] It will be appreciated that a number of well-known reactions may be used to attach the drug moiety and/or linker to the selected antibody. For example, various reactions exploiting sulfhydryl groups of cysteines may be employed to conjugate the desired moiety. Some embodiments will comprise conjugation of antibodies comprising one or more free cysteines as discussed in detail below. In other embodiments ADCs of the instant invention may be generated through conjugation of drugs to solvent-exposed amino groups of lysine residues present in the selected antibody. Still other embodiments comprise activation of N-terminal threonine and serine residues which may then be used to attach the disclosed payloads to the antibody. The selected conjugation methodology will preferably be tailored to optimize the number of drugs attached to the antibody and provide a relatively high therapeutic index.

[0439] Various methods are known in the art for conjugating a therapeutic compound to a cysteine residue and will be apparent to the skilled artisan. Under basic conditions the cysteine residues will be deprotonated to generate a thiolate nucleophile which may be reacted with soft electrophiles such as maleimides and iodoacetamides. Generally reagents for such conjugations may react directly with a cysteine thiol to form the conjugated protein or with a linker-drug to form a linker-drug intermediate. In the case of a linker, several routes, employing organic chemistry reactions, conditions, and reagents are known to those skilled in the art, including: (1) reaction of a cysteine group of the protein of the invention with a linker reagent, to form a protein-linker intermediate, via a covalent bond, followed by reaction with an activated compound; and (2) reaction of a nucleophilic group of a compound with a linker reagent, to form a drug linker intermediate, via a covalent bond, followed by reaction with a cysteine group of a protein of the invention. As will be apparent to the skilled artisan from the foregoing, bifunctional (or bivalent) linkers are useful in the present invention. For example, the bifunctional linker may comprise a thiol modification group for covalent linkage to the cysteine residue(s) and at least one attachment moiety (e.g., a second thiol modification moiety) for covalent or non-covalent linkage to the compound.

[0440] Prior to conjugation, antibodies may be made reactive for conjugation with linker reagents by treatment with a reducing agent such as dithiothreitol (DTT) or (tris(2-carboxyethyl)phosphine (TCEP). In other embodiments additional nucleophilic groups can be introduced into antibodies through the reaction of lysines with reagents, including but not limited to, 2-iminothiolane (Traut's reagent), SATA, SATP or SAT(PEG)4, resulting in conversion of an amine into a thiol.

[0441] With regard to such conjugations cysteine thiol or lysine amino groups are nucleophilic and capable of reacting to form covalent bonds with electrophilic groups on linker reagents or compound-linker intermediates or drugs including: (i) active esters such as NHS esters, HOBt esters, haloformates, and acid halides; (ii) alkyl and benzyl halides, such as haloacetamides; (iii) aldehydes, ketones, carboxyl, and maleimide groups; and (iv) disulfides, including pyridyl disulfides, via sulfide exchange. Nucleophilic groups on a compound or linker include, but are not limited to amine, thiol, hydroxyl, hydrazide, oxime, hydrazine, thiosemicarbazone, hydrazine carboxylate, and arylhydrazide groups capable of reacting to form covalent bonds with electrophilic groups on linker moieties and linker reagents.

[0442] Conjugation reagents commonly include maleimide, haloacetyl, iodoacetamide succinimidyl ester, isothiocyanate, sulfonyl chloride, 2,6-dichlorotriazinyl, pentafluorophenyl ester, and phosphoramidite, although other functional groups can also be used. In certain embodiments methods include, for example, the use of maleimides, iodoacetimides or haloacetyl/alkyl halides, aziridne, acryloyl derivatives to react with the thiol of a cysteine to produce a thioether that is reactive with a compound. Disulphide exchange of a free thiol with an activated piridyldisulphide is also useful for producing a conjugate (e.g., use of 5-thio-2-nitrobenzoic (TNB) acid). Preferably, a maleimide is used.

[0443] As indicated above, lysine may also be used as a reactive residue to effect conjugation as set forth herein. The nucleophilic lysine residue is commonly targeted through amine-reactive succinimidylesters. To obtain an optimal number of deprotonated lysine residues, the pH of the aqueous solution must be below the pKa of the lysine ammonium group, which is around 10.5, so the typical pH of the reaction is about 8 and 9. The common reagent for the coupling reaction is NHS-ester which reacts with nucleophilic lysine through a lysine acylation mechanism. Other compatible reagents that undergo similar reactions comprise isocyanates and isothiocyanates which also may be used in conjunction with the teachings herein to provide ADCs. Once the lysines have been activated, many of the aforementioned linking groups may be used to covalently bind the warhead to the antibody.

[0444] Methods are also known in the art for conjugating a compound to a threonine or serine residue (preferably a N-terminal residue). For example methods have been described in which carbonyl precursors are derived from the 1,2-aminoalcohols of serine or threonine, which can be selectively and rapidly converted to aldehyde form by periodate oxidation. Reaction of the aldehyde with a 1,2-aminothiol of cysteine in a compound to be attached to a protein of the invention forms a stable thiazolidine product. This method is particularly useful for labeling proteins at N-terminal serine or threonine residues.

[0445] In some embodiments reactive thiol groups may be introduced into the selected antibody (or fragment thereof) by introducing one, two, three, four, or more free cysteine residues (e.g., preparing antibodies comprising one or more free non-native cysteine amino acid residues).

[0446] Such site-specific antibodies or engineered antibodies allow for conjugate preparations that exhibit enhanced stability and substantial homogeneity due, at least in part, to the provision of engineered free cysteine site(s) and/or the novel conjugation procedures set forth herein. Unlike conventional conjugation methodology that fully or partially reduces each of the intrachain or interchain antibody disulfide bonds to provide conjugation sites (and is fully compatible with the instant invention), the present invention additionally provides for the selective reduction of certain prepared free cysteine sites and attachment of the drug linker to the same.

[0447] In this regard it will be appreciated that the conjugation specificity promoted by the engineered sites and the selective reduction allows for a high percentage of site directed conjugation at the desired positions. Significantly some of these conjugation sites, such as those present in the terminal region of the light chain constant region, are typically difficult to conjugate effectively as they tend to cross-react with other free cysteines. However, through molecular engineering and selective reduction of the resulting free cysteines, efficient conjugation rates may be obtained which considerably reduces unwanted high-DAR contaminants and non-specific toxicity. More generally the engineered constructs and disclosed novel conjugation methods comprising selective reduction provide ADC preparations having improved pharmacokinetics and/or pharmacodynamics and, potentially, an improved therapeutic index.

[0448] In certain embodiments site-specific constructs present free cysteine(s) which, when reduced, comprise thiol groups that are nucleophilic and capable of reacting to form covalent bonds with electrophilic groups on linker moieties such as those disclosed above. As discussed above antibodies of the instant invention may have reducible unpaired interchain or intrachain cysteines or introduced non-native cysteines, i.e. cysteines providing such nucleophilic groups. Thus, in certain embodiments the reaction of free sulfhydryl groups of the reduced free cysteines and the terminal maleimido or haloacetamide groups of the disclosed drug linkers will provide the desired conjugation. In such cases free cysteines of the antibodies may be made reactive for conjugation with linker reagents by treatment with a reducing agent such as dithiothreitol (DTT) or (tris (2-carboxyethyl)phosphine (TCEP). Each free cysteine will thus present, theoretically, a reactive thiol nucleophile. While such reagents are particularly compatible with the instant invention it will be appreciated that conjugation of site-specific antibodies may be effected using various reactions, conditions and reagents generally known to those skilled in the art.

[0449] In addition it has been found that the free cysteines of engineered antibodies may be selectively reduced to provide enhanced site-directed conjugation and a reduction in unwanted, potentially toxic contaminants. More specifically “stabilizing agents” such as arginine have been found to modulate intra- and inter-molecular interactions in proteins and may be used, in conjunction with selected reducing agents (preferably relatively mild), to selectively reduce the free cysteines and to facilitate site-specific conjugation as set forth herein. As used herein the terms “selective reduction” or “selectively reducing” may be used interchangeably and shall mean the reduction of free cysteine(s) without substantially disrupting native disulfide bonds present in the engineered antibody. In selected embodiments this selective reduction may be effected by the use of certain reducing agents or certain reducing agent concentrations. In other embodiments selective reduction of an engineered construct will comprise the use of stabilization agents in combination with reducing agents (including mild reducing agents). It will be appreciated that the term “selective conjugation” shall mean the conjugation of an engineered antibody that has been selectively reduced in the presence of a cytotoxin as described herein. In this respect the use of such stabilizing agents (e.g., arginine) in combination with selected reducing agents can markedly improve the efficiency of site-specific conjugation as determined by extent of conjugation on the heavy and light antibody chains and DAR distribution of the preparation. Compatible antibody constructs and selective conjugation techniques and reagents are extensively disclosed in WO2015/031698 which is incorporated herein specifically as to such methodology and constructs.

[0450] While not wishing to be bound by any particular theory, such stabilizing agents may act to modulate the electrostatic microenvironment and/or modulate conformational changes at the desired conjugation site, thereby allowing relatively mild reducing agents (which do not materially reduce intact native disulfide bonds) to facilitate conjugation at the desired free cysteine site(s). Such agents (e.g., certain amino acids) are known to form salt bridges (via hydrogen bonding and electrostatic interactions) and can modulate protein-protein interactions in such a way as to impart a stabilizing effect that may cause favorable conformational changes and/or reduce unfavorable protein-protein interactions. Moreover, such agents may act to inhibit the formation of undesired intramolecular (and intermolecular) cysteine-cysteine bonds after reduction thus facilitating the desired conjugation reaction wherein the engineered site-specific cysteine is bound to the drug (preferably via a linker). Since selective reduction conditions do not provide for the significant reduction of intact native disulfide bonds, the subsequent conjugation reaction is naturally driven to the relatively few reactive thiols on the free cysteines (e.g., preferably 2 free thiols per antibody). As previously alluded to, such techniques may be used to considerably reduce levels of non-specific conjugation and corresponding unwanted DAR species in conjugate preparations fabricated in accordance with the instant disclosure.

[0451] In selected embodiments stabilizing agents compatible with the present invention will generally comprise compounds with at least one moiety having a basic pKa. In certain embodiments the moiety will comprise a primary amine while in other embodiments the amine moiety will comprise a secondary amine. In still other embodiments the amine moiety will comprise a tertiary amine or a guanidinium group. In other selected embodiments the amine moiety will comprise an amino acid while in other compatible embodiments the amine moiety will comprise an amino acid side chain. In yet other embodiments the amine moiety will comprise a proteinogenic amino acid. In still other embodiments the amine moiety comprises a non-proteinogenic amino acid. In some embodiments, compatible stabilizing agents may comprise arginine, lysine, proline and cysteine. In certain preferred embodiments the stabilizing agent will comprise arginine. In addition compatible stabilizing agents may include guanidine and nitrogen containing heterocycles with basic pKa.

[0452] In certain embodiments compatible stabilizing agents comprise compounds with at least one amine moiety having a pKa of greater than about 7.5, in other embodiments the subject amine moiety will have a pKa of greater than about 8.0, in yet other embodiments the amine moiety will have a pKa greater than about 8.5 and in still other embodiments the stabilizing agent will comprise an amine moiety having a pKa of greater than about 9.0. Other embodiments will comprise stabilizing agents where the amine moiety will have a pKa of greater than about 9.5 while certain other embodiments will comprise stabilizing agents exhibiting at least one amine moiety having a pKa of greater than about 10.0. In still other embodiments the stabilizing agent will comprise a compound having the amine moiety with a pKa of greater than about 10.5, in other embodiments the stabilizing agent will comprise a compound having a amine moiety with a pKa greater than about 11.0, while in still other embodiments the stabilizing agent will comprise a amine moiety with a pKa greater than about 11.5. In yet other embodiments the stabilizing agent will comprise a compound having an amine moiety with a pKa greater than about 12.0, while in still other embodiments the stabilizing agent will comprise an amine moiety with a pKa greater than about 12.5. Those of skill in the art will understand that relevant pKa's may readily be calculated or determined using standard techniques and used to determine the applicability of using a selected compound as a stabilizing agent.

[0453] The disclosed stabilizing agents are shown to be particularly effective at targeting conjugation to free site-specific cysteines when combined with certain reducing agents. For the purposes of the instant invention, compatible reducing agents may include any compound that produces a reduced free site-specific cysteine for conjugation without significantly disrupting the native disulfide bonds of the engineered antibody. Under such conditions, preferably provided by the combination of selected stabilizing and reducing agents, the activated drug linker is largely limited to binding to the desired free site-specific cysteine site(s). Relatively mild reducing agents or reducing agents used at relatively low concentrations to provide mild conditions are particularly preferred. As used herein the terms “mild reducing agent” or “mild reducing conditions” shall be held to mean any agent or state brought about by a reducing agent (optionally in the presence of stabilizing agents) that provides thiols at the free cysteine site(s) without substantially disrupting native disulfide bonds present in the engineered antibody. That is, mild reducing agents or conditions (preferably in combination with a stabilizing agent) are able to effectively reduce free cysteine(s) (provide a thiol) without significantly disrupting the protein's native disulfide bonds. The desired reducing conditions may be provided by a number of sulfhydryl-based compounds that establish the appropriate environment for selective conjugation. In embodiments mild reducing agents may comprise compounds having one or more free thiols while in some embodiments mild reducing agents will comprise compounds having a single free thiol. Non-limiting examples of reducing agents compatible with the selective reduction techniques of the instant invention comprise glutathione, n-acetyl cysteine, cysteine, 2-aminoethane-1-thiol and 2-hydroxyethane-1-thiol.

[0454] It will be appreciated that selective reduction process set forth above is particularly effective at targeted conjugation to the free cysteine. In this respect the extent of conjugation to the desired target site (defined here as “conjugation efficiency”) in site-specific antibodies may be determined by various art-accepted techniques. The efficiency of the site-specific conjugation of a drug to an antibody may be determined by assessing the percentage of conjugation on the target conjugation site(s) (e.g. free cysteines on the c-terminus of each light chain) relative to all other conjugated sites. In certain embodiments, the method herein provides for efficiently conjugating a drug to an antibody comprising free cysteines. In some embodiments, the conjugation efficiency is at least 5%, at least 10%, at least 15%, at least 20%, at least 25%, at least 30%, at least 35%, at least 40%, at least 45%, at least 50%, at least 55%, at least 60%, at least 70%, at least 75%, at least 80%, at least 85%, at least 90%, at least 95%, at least 98% or more as measured by the percentage of target conjugation relative to all other conjugation sites.

[0455] It will further be appreciated that engineered antibodies capable of conjugation may contain free cysteine residues that comprise sulfhydryl groups that are blocked or capped as the antibody is produced or stored. Such caps include small molecules, proteins, peptides, ions and other materials that interact with the sulfhydryl group and prevent or inhibit conjugate formation. In some cases the unconjugated engineered antibody may comprise free cysteines that bind other free cysteines on the same or different antibodies. As discussed herein such cross-reactivity may lead to various contaminants during the fabrication procedure. In some embodiments, the engineered antibodies may require uncapping prior to a conjugation reaction. In specific embodiments, antibodies herein are uncapped and display a free sulfhydryl group capable of conjugation. In specific embodiments, antibodies herein are subjected to an uncapping reaction that does not disturb or rearrange the naturally occurring disulfide bonds. It will be appreciated that in most cases the uncapping reactions will occur during the normal reduction reactions (reduction or selective reduction).

[0456] D. DAR Distribution and Purification

[0457] In selected embodiments conjugation and purification methodology compatible with the present invention advantageously provides the ability to generate relatively homogeneous ADC preparations comprising a narrow DAR distribution. In this regard the disclosed constructs (e.g., site-specific constructs) and/or selective conjugation provides for homogeneity of the ADC species within a sample in terms of the stoichiometric ratio between the drug and the engineered antibody and with respect to the toxin location. As briefly discussed above the term “drug to antibody ratio” or “DAR” refers to the molar ratio of drug to antibody in an ADC preparation. In certain embodiments a conjugate preparation may be substantially homogeneous with respect to its DAR distribution, meaning that within the ADC preparation is a predominant species of site-specific ADC with a particular drug loading (e.g., a drug loading of 2 or 4) that is also uniform with respect to the site of loading (i.e., on the free cysteines). In other certain embodiments of the invention it is possible to achieve the desired homogeneity through the use of site-specific antibodies and/or selective reduction and conjugation. In other embodiments the desired homogeneity may be achieved through the use of site-specific constructs in combination with selective reduction. In yet other embodiments compatible preparations may be purified using analytical or preparative chromatography techniques to provide the desired homogeneity. In each of these embodiments the homogeneity of the ADC sample can be analyzed using various techniques known in the art including but not limited to mass spectrometry, HPLC (e.g. size exclusion HPLC, RP-HPLC, HIC-HPLC etc.) or capillary electrophoresis.

[0458] With regard to the purification of ADC preparations it will be appreciated that standard pharmaceutical preparative methods may be employed to obtain the desired purity. As discussed herein liquid chromatography methods such as reverse phase (RP) and hydrophobic interaction chromatography (HIC) may separate compounds in the mixture by drug loading value. In some cases, ion-exchange (IEC) or mixed-mode chromatography (MMC) may also be used to isolate species with a specific drug load.

[0459] In any event the disclosed ADCs and preparations thereof may comprise drug and antibody moieties in various stoichiometric molar ratios depending on the configuration of the antibody and, at least in part, on the method used to effect conjugation. In certain embodiments the drug loading per ADC may comprise from 1-20 warheads (i.e., n is 1-20). Other selected embodiments may comprise ADCs with a drug loading of from 1 to 15 warheads. In still other embodiments the ADCs may comprise from 1-12 warheads or, more preferably, from 1-10 warheads. In some embodiments the ADCs will comprise from 1 to 8 warheads. While theoretical drug loading may be relatively high, practical limitations such as free cysteine cross reactivity and warhead hydrophobicity tend to limit the generation of homogeneous preparations comprising such DAR due to aggregates and other contaminants. That is, higher drug loading, e.g. >8 or 10, may cause aggregation, insolubility, toxicity, or loss of cellular permeability of certain antibody-drug conjugates depending on the payload. In view of such concerns drug loading provided by the instant invention preferably ranges from 1 to 8 drugs per conjugate, i.e. where 1, 2, 3, 4, 5, 6, 7, or 8 drugs are covalently attached to each antibody (e.g., for IgG1, other antibodies may have different loading capacity depending the number of disulfide bonds). Preferably the DAR of compositions of the instant invention will be approximately 2, 4 or 6 and in some embodiments the DAR will comprise approximately 2.

[0460] Despite the relatively high level of homogeneity provided by the instant invention the disclosed compositions actually comprise a mixture of conjugates with a range of drug compounds (potentially from 1 to 8 in the case of an IgG1). As such, the disclosed ADC compositions include mixtures of conjugates where most of the constituent antibodies are covalently linked to one or more drug moieties and (despite the relative conjugate specificity provided by engineered constructs and selective reduction) where the drug moieties may be attached to the antibody by various thiol groups. That is, following conjugation, compositions of the invention will comprise a mixture of ADCs with different drug loads (e.g., from 1 to 8 drugs per IgG1 antibody) at various concentrations (along with certain reaction contaminants primarily caused by free cysteine cross reactivity). However using selective reduction and post-fabrication purification the conjugate compositions may be driven to the point where they largely contain a single predominant desired ADC species (e.g., with a drug loading of 2) with relatively low levels of other ADC species (e.g., with a drug loading of 1, 4, 6, etc.). The average DAR value represents the weighted average of drug loading for the composition as a whole (i.e., all the ADC species taken together). Due to inherent uncertainty in the quantification methodology employed and the difficulty in completely removing the non-predominant ADC species in a commercial setting, acceptable DAR values or specifications are often presented as an average, a range or distribution (i.e., an average DAR of 2+/−0.5). Preferably compositions comprising a measured average DAR within the range (i.e., 1.5 to 2.5) would be used in a pharmaceutical setting.

[0461] Thus, in some embodiments the present invention will comprise compositions having an average DAR of 1, 2, 3, 4, 5, 6, 7 or 8 each +/−0.5. In other embodiments the present invention will comprise an average DAR of 2, 4, 6 or 8+/−0.5. Finally, in selected embodiments the present invention will comprise an average DAR of 2+/−0.5 or 4+/−0.5. It will be appreciated that the range or deviation may be less than 0.4 in some embodiments. Thus, in other embodiments the compositions will comprise an average DAR of 1, 2, 3, 4, 5, 6, 7 or 8 each +/−0.3, an average DAR of 2, 4, 6 or 8+/−0.3, even more preferably an average DAR of 2 or 4+/−0.3 or even an average DAR of 2+/−0.3. In other embodiments IgG1 conjugate compositions will preferably comprise a composition with an average DAR of 1, 2, 3, 4, 5, 6, 7 or 8 each +/−0.4 and relatively low levels (i.e., less than 30%) of non-predominant ADC species. In other embodiments the ADC composition will comprise an average DAR of 2, 4, 6 or 8 each +/−0.4 with relatively low levels (≤30%) of non-predominant ADC species. In some embodiments the ADC composition will comprise an average DAR of 2+/−0.4 with relatively low levels (≤30%) of non-predominant ADC species. In yet other embodiments the predominant ADC species (e.g., with a drug loading of 2 or drug loading of 4) will be present at a concentration of greater than 50%, at a concentration of greater than 55%, at a concentration of greater than 60%, at a concentration of greater than 65%, at a concentration of greater than 70%, at a concentration of greater than 75%, at a concentration of greater that 80%, at a concentration of greater than 85%, at a concentration of greater than 90%, at a concentration of greater than 93%, at a concentration of greater than 95% or even at a concentration of greater than 97% when measured against all other DAR species present in the composition.

[0462] As detailed in the Examples below the distribution of drugs per antibody in preparations of ADC from conjugation reactions may be characterized by conventional means such as UV-Vis spectrophotometry, reverse phase HPLC, HIC, mass spectroscopy, ELISA, and electrophoresis. The quantitative distribution of ADC in terms of drugs per antibody may also be determined. By ELISA, the averaged value of the drugs per antibody in a particular preparation of ADC may be determined. However, the distribution of drug per antibody values is not discernible by the antibody-antigen binding and detection limitation of ELISA. Also, ELISA assay for detection of antibody-drug conjugates does not determine where the drug moieties are attached to the antibody, such as the heavy chain or light chain fragments, or the particular amino acid residues.

### VII. Diagnostics and Screening

[0463] A. Diagnostics

[0464] The invention provides in vitro and in vivo methods for detecting, diagnosing or monitoring proliferative disorders and methods of screening cells from a patient to identify tumor cells including tumorigenic cells. Such methods include identifying an individual having cancer for treatment or monitoring progression of a cancer, comprising contacting the patient or a sample obtained from a patient (either in vivo or in vitro) with a detection agent (e.g., an antibody or nucleic acid probe) capable of specifically recognizing and associating with DLL3 or ASCL1 and detecting the presence or absence, or level of association of the detection agent in the sample. In selected embodiments the detection agent will comprise an antibody associated with a detectable label or reporter molecule as described herein. In yet other embodiments (e.g., In situ hybridization or ISH) a nucleic acid probe that reacts with a genomic DLL3 or ASCL1 determinant will be used in the detection, diagnosis or monitoring of the proliferative disorder.

[0465] More generally the presence and/or levels of DLL3 or ASCL1 determinants may be measured using any of a number of techniques available to the person of ordinary skill in the art for protein or nucleic acid analysis, e.g., direct physical measurements (e.g., mass spectrometry), binding assays (e.g., immunoassays, agglutination assays, and immunochromatographic assays), Polymerase Chain Reaction (PCR, RT-PCR; RT-qPCR) technology, branched oligonucleotide technology, Northern blot technology, oligonucleotide hybridization technology and in situ hybridization technology. The method may also comprise measuring a signal that results from a chemical reaction, e.g., a change in optical absorbance, a change in fluorescence, the generation of chemiluminescence or electrochemiluminescence, a change in reflectivity, refractive index or light scattering, the accumulation or release of detectable labels from the surface, the oxidation or reduction or redox species, an electrical current or potential, changes in magnetic fields, etc. Suitable detection techniques may detect binding events by measuring the participation of labeled binding reagents through the measurement of the labels via their photoluminescence (e.g., via measurement of fluorescence, time-resolved fluorescence, evanescent wave fluorescence, up-converting phosphors, multi-photon fluorescence, etc.), chemiluminescence, electrochemiluminescence, light scattering, optical absorbance, radioactivity, magnetic fields, enzymatic activity (e.g., by measuring enzyme activity through enzymatic reactions that cause changes in optical absorbance or fluorescence or cause the emission of chemiluminescence). Alternatively, detection techniques may be used that do not require the use of labels, e.g., techniques based on measuring mass (e.g., surface acoustic wave measurements), refractive index (e.g., surface plasmon resonance measurements), or the inherent luminescence of an analyte.

[0466] In some embodiments, the association of the detection agent with particular cells or cellular components in the sample indicates that the sample may contain tumorigenic cells, thereby denoting that the individual having cancer may be effectively treated with an antibody or ADC as described herein.

[0467] In certain preferred embodiments the assays may comprise immunohistochemistry (IHC) assays or variants thereof (e.g., fluorescent, chromogenic, standard ABC, standard LSAB, etc.), immunocytochemistry or variants thereof (e.g., direct, indirect, fluorescent, chromogenic, etc.) or In situ hybridization (ISH) or variants thereof (e.g., chromogenic in situ hybridization (CISH) or fluorescence in situ hybridization (DNA-FISH or RNA-FISH]))

[0468] In this regard certain aspects of the instant invention comprise the use of labeled DLL3 or labeled ASCL1 for immunohistochemistry (IHC). More particularly DLL3 IHC or ASCL1 IHC may be used as a diagnostic tool to aid in the diagnosis of various proliferative disorders and to monitor the potential response to treatments including DLL3 antibody therapy. As discussed herein and shown in the Examples below compatible diagnostic assays may be performed on tissues that have been chemically fixed (compatible techniques include, but are not limited to: formaldehyde, glutaraldehyde, osmium tetroxide, potassium dichromate, acetic acid, alcohols, zinc salts, mercuric chloride, chromium tetroxide and picric acid) and embedded (compatible methods include but are not limited to: glycol methacrylate, paraffin and resins) or preserved via freezing. Such assays can be used to guide treatment decisions and determine dosing regimens and timing.

[0469] Immunohistochemistry techniques may be used to derive an ASLC1 H-score as known in the art. Such H-scores may be used to indicate which patients may be amenable to treatment with the compositions of the instant invention. H-scores of approximately 90, approximately 100, approximately 110, approximately 120, approximately 130, approximately 140, approximately 150, approximately 160, approximately 170, approximately 180, approximately 190 or approximately 200 or above on a 300 point scale may be used in selected embodiments to indicate which patients may respond favorably to the treatment methods of the instant invention. Accordingly in one embodiment a patient to be treated with the DLL3 ADCs of the instant invention will have an H-score of at least 90 (i.e., the tumor is ASCL1⁺⁾ on a 300 point scale. In other embodiments a patient to be treated with the DLL3 ADCs of the instant invention will have an ASLC1 H-score of at least 120. In yet other embodiments a patient to be treated with the DLL3 ADCs of the instant invention will have an ASLC1 H-score of at least 180. For the purposes of the instant disclosure any tumor exhibiting an ASLC1 H-score of 90 or above on a 300 point scale will be considered ASCL1⁺ tumor and subject to treatment with the disclosed antibodies or ADCs.

[0470] In still other embodiments patient selection may be predicated on the percent of marker (e.g., ASCL1) positive cells staining with a certain intensity. By way of example, a tumor with >20% of the cells exhibiting 2+ intensity or greater will be a candidate for treatment with a DLL3 ADC. In other embodiments a patient will be a candidate for treatment with a DLL3 ADC or other chemotherapeutic agent if ≥20%, ≥30%, ≥40%, ≥50%, ≥60%, ≥70% or ≥80% of the tumor cells exhibit 1+ intensity or greater when stained with a marker antibody (e.g., an anti-ASCL1 antibody) and examined in accordance with standard IHC protocols as disclosed herein. In other certain embodiments a patient will be a candidate for treatment with a DLL3 ADC or other chemotherapeutic agent if ≥20%, ≥30%, ≥40%, ≥50%, ≥60%, ≥70% or ≥80% of the tumor cells exhibit 2+ intensity or greater when stained with a marker antibody and examined in accordance with standard IHC protocols as disclosed herein. In yet other selected embodiments a patient will be a candidate for treatment with a DLL3 ADC or other chemotherapeutic agent if ≥10%, ≥20%, ≥30%, ≥40% or ≥50% of the tumor cells exhibit 1+ intensity or greater when stained with a marker antibody and examined in accordance with standard IHC protocols as disclosed herein. In still other embodiments a patient will be a candidate for treatment with a DLL3 ADC or other chemotherapeutic agent if ≥10%, ≥20%, ≥30%, ≥40% or ≥50% of the tumor cells exhibit 2+ intensity or greater when stained with a marker antibody and examined in accordance with standard IHC protocols as disclosed herein. Yet another embodiment comprises a method of treating a subject having a tumor comprising tumor cells wherein ≥10% of the tumor cells exhibit 1+ intensity or greater when stained with a marker antibody and examined in accordance with standard IHC protocols comprising the step of administering an anti-DLL3 ADC. With regard to each of the aforementioned embodiments it will be appreciated that the intensity of staining with a marker antibody may be readily determined using standard pathology techniques and methodology familiar to those of skill in the art.

[0471] As discussed above certain marker levels and DLL3 expression will be decreased or reduced as compared to a reference expression level in a control sample. More specifically, tumors at risk of transitioning to a neuroendocrine phenotype may express lower levels of one markers selected from the group consisting of Retinoblastoma 1 (RB1), Repressor Element-1 Silencing Transcription Factor (REST), SAM Pointed Domain-containing Ets Transcription Factor (SPDEF), Prostaglandin E2 Receptor 4 (PTGER4), and ETS-Related Gene (ERG). In addition such tumors may express relatively low levels of DLL3 protein and may be classified as ASCL1⁺, DLL3^{-/low} wherein DLL3⁻ is indicative of non-detectable or barely detectable levels of expression and DLL3^{-/low} is indicative of relatively depressed levels of DLL3 found in certain tumors (e.g., adenocarcinoma). In this regard DLL3^{low} will be held to mean any tumor comprising a DLL3 expression level that is reduced by 5%, 10%, 15%, 20%, 25%, 30%, 40%, 50%, 60%, 70%, 80%, 85%, 90%, 95%, 96%, 97%, 98%, 99% or more as compared to a reference expression level in a control sample (e.g., a DLL3+ or hi tumor). In certain embodiments DLL3 expression will be reduced by 50%, 60%, 70%, 80%, 85%, 90%, 95%, 96%, 97%, 98%, 99% or more as compared to a reference expression level in a control sample. In still other embodiments DLL3 expression will be reduced by 80%, 85%, 90%, 95%, 96%, 97%, 98%, 99% or more as compared to a reference expression level in a control sample while in other embodiments DLL3 expression will be reduced by 90%, 95%, 96%, 97%, 98%, 99% or more as compared to a reference expression level in a control sample. In selected embodiments DLL3 expression will be reduced by at least 90%, by at least 95%, by at least 97% or by at least 99% when compared to a sample obtained from a DLL3⁺ tumor.

[0472] In other embodiments the tumor sample may compared to control tumor samples known not to express DLL3 (negative control). When such comparisons are made the tumor sample obtained from the subject may be classified as DLL3⁻ if it exhibits substantially the same level of DLL3 as the negative control.

[0473] In yet other embodiments DLL3^{-/low} tumors may readily be identified by trained pathologists using IHC in view of the instant disclosure. More specifically tumor samples may be obtained, preferably fixed and stained with anti-DLL3 antibodies as disclosed herein and read using art-recognized techniques. In certain embodiments the expression of DLL3 may be visually determined by the pathologist using appropriate positive and negative controls. In other embodiments the scoring could be based on a derived H-score may comprise the measurement of percent of positively stained cells in a tumor sample. With respect to the latter a tumor may be found to be DLL3^{-/low} if less than about 20%, 15%, 10%, 8%, 5%, 4%, 3%, 2% or 1% of the cells stain positive using standard IHC techniques. In other embodiments a tumor may be found to be DLL3^{-/low} if less than about 0.8%, 0.6%, 0.4%, 0.2% or 0.1% of the cells stain positive when interrogated with a DLL3 antibody as described herein. In other embodiments the skilled artisan may make a qualitative judgement as to what constitutes a DLL3^{-/low} tumor upon review of the slides based on factors such as relative intensity, staining patterns, sample origin and preparation, antibody and reporter employed, etc. As previously alluded to any determination as to the level of DLL3 expression is made in the context of appropriate positive and negative controls and is relatively accurate. Accordingly such determinations are indicative as to which patients are susceptible to treatment with DLL3 ADCs as described herein.

[0474] Other particularly compatible aspects of the invention involve the use of in situ hybridization to detect or monitor DLL3 or ASCL1 determinants. In situ hybridization technology or ISH is well known to those of skill in the art. Briefly, cells are fixed and detectable probes which contain a specific nucleotide sequence are added to the fixed cells. If the cells contain complementary nucleotide sequences, the probes, which can be detected, will hybridize to them. Using the sequence information set forth herein, probes can be designed to identify cells that express genotypic DLL3 or ASCL1 determinants. Probes preferably hybridize to a nucleotide sequence that corresponds to such determinants. Hybridization conditions can be routinely optimized to minimize background signal by non-fully complementary hybridization though preferably the probes are preferably fully complementary to the selected DLL3 or ASCL1 determinant. In selected embodiments the probes are labeled with fluorescent dye attached to the probes that is readily detectable by standard fluorescent methodology.

[0475] Compatible in vivo theragnostics or diagnostic assays may comprise art-recognized imaging or monitoring techniques such as magnetic resonance imaging, computerized tomography (e.g. CAT scan), positron tomography (e.g., PET scan) radiography, ultrasound, etc., as would be known by those skilled in the art.

[0476] In certain embodiments the antibodies of the instant invention may be used to detect and quantify levels of a particular determinant (e.g., DLL3 protein or ASCL1 protein) in a patient sample (e.g., plasma or blood) which may, in turn, be used to detect, diagnose or monitor proliferative disorders that are associated with the relevant determinant. In related embodiments the antibodies of the instant invention may be used to detect, monitor and/or quantify circulating tumor cells either in vivo or in vitro (WO 2012/0128801). In still other embodiments the circulating tumor cells may comprise tumorigenic cells.

[0477] In certain embodiments of the invention, the tumorigenic cells in a subject or a sample from a subject may be assessed or characterized using the disclosed antibodies prior to therapy or regimen to establish a baseline. In other examples, the tumorigenic cells can be assessed from a sample that is derived from a subject that was treated.

[0478] In another embodiment, the invention provides a method of analyzing cancer progression and/or pathogenesis in vivo. In another embodiment, analysis of cancer progression and/or pathogenesis in vivo comprises determining the extent of tumor progression. In another embodiment, analysis comprises the identification of the tumor. In another embodiment, analysis of tumor progression is performed on the primary tumor. In another embodiment, analysis is performed over time depending on the type of cancer as known to one skilled in the art. In another embodiment, further analysis of secondary tumors originating from metastasizing cells of the primary tumor is conducted in vivo. In another embodiment, the size and shape of secondary tumors are analyzed. In some embodiments, further ex vivo analysis is performed.

[0479] In another embodiment, the invention provides a method of analyzing cancer progression and/or pathogenesis in vivo including determining cell metastasis or detecting and quantifying the level of circulating tumor cells. In yet another embodiment, analysis of cell metastasis comprises determination of progressive growth of cells at a site that is discontinuous from the primary tumor. In some embodiments, procedures may be undertaken to monitor tumor cells that disperse via blood vasculature, lymphatics, within body cavities or combinations thereof. In another embodiment, cell metastasis analysis is performed in view of cell migration, dissemination, extravasation, proliferation or combinations thereof.

[0480] In certain examples, the tumorigenic cells in a subject or a sample from a subject may be assessed or characterized using the disclosed antibodies prior to therapy to establish a baseline. In other examples the sample is derived from a subject that was treated. In some examples the sample is taken from the subject at least about 1, 2, 4, 6, 7, 8, 10, 12, 14, 15, 16, 18, 20, 30, 60, 90 days, 6 months, 9 months, 12 months, or >12 months after the subject begins or terminates treatment. In certain examples, the tumorigenic cells are assessed or characterized after a certain number of doses (e.g., after 2, 5, 10, 20, 30 or more doses of a therapy). In other examples, the tumorigenic cells are characterized or assessed after 1 week, 2 weeks, 1 month, 2 months, 1 year, 2 years, 3 years, 4 years or more after receiving one or more therapies.

[0481] B. Screening

[0482] In certain embodiments, antibodies of the instant invention can be used to screen samples in order to identify compounds or agents (e.g., antibodies or ADCs) that alter a function or activity of tumor cells by interacting with a determinant. In one embodiment, tumor cells are put in contact with an antibody or ADC and the antibody or ADC can be used to screen the tumor for cells expressing a certain target (e.g. DLL3 or ASCL1) in order to identify such cells for purposes, including but not limited to, diagnostic purposes, to monitor such cells to determine treatment efficacy or to enrich a cell population for such target-expressing cells.

[0483] In yet another embodiment, a method includes contacting, directly or indirectly, tumor cells with a test agent or compound and determining if the test agent or compound modulates an activity or function of the determinant-associated tumor cells for example, changes in cell morphology or viability, expression of a marker, differentiation or de-differentiation, cell respiration, mitochondrial activity, membrane integrity, maturation, proliferation, viability, apoptosis or cell death. One example of a direct interaction is physical interaction, while an indirect interaction includes, for example, the action of a composition upon an intermediary molecule that, in turn, acts upon the referenced entity (e.g., cell or cell culture).

[0484] Screening methods include high throughput screening, which can include arrays of cells (e.g., microarrays) positioned or placed, optionally at pre-determined locations, for example, on a culture dish, tube, flask, roller bottle or plate. High-throughput robotic or manual handling methods can probe chemical interactions and determine levels of expression of many genes in a short period of time. Techniques have been developed that utilize molecular signals, for example via fluorophores or microarrays (Mocellin and Rossi, 2007, PMID: 17265713) and automated analyses that process information at a very rapid rate (see, e.g., Pinhasov et al., 2004, PMID: 15032660). Libraries that can be screened include, for example, small molecule libraries, phage display libraries, fully human antibody yeast display libraries (Adimab), siRNA libraries, and adenoviral transfection vectors.

### VIII. Pharmaceutical Preparations and Therapeutic Uses

[0485] Anti-DLL3 ADC therapy for DLL3⁺ tumors is well-described. See e.g, PCT Publication Nos. WO 2013126746 and WO 2014130879; and Pietanza et al., EMSO Abstract 2015. In particular, DLL3 expression correlates with tumors that transition to a neuroendocrine phenotype and thereafter are highly untreatable using standard of care. The present invention provides methods and compositions for identifying tumors at risk for neuroendocrine transition, such that patients having the disclosed risk factors are identifiable as candidates for treatment of tumors that are DLL3^{-/low} with an anti-DLL3 antibody drug conjugate. As detailed herein, risk factors include (1) various proteins are expressed in tumors during the transition to a neuroendocrine phenotype and prior to substantial DLL3 expression, and (2) prior treatment with a targeted therapy.

[0486] The early treatment of tumor at risk of transitioning to a neuroendocrine phenotype is beneficial for reducing or inhibiting tumor recurrence. In particular anti-DLL3 antibody drug conjugates may be effective in treating DLL3^{-/low} tumors that show one or more risk factors, as disclosed herein, for a neuroendocrine transition, to thereby reduce the incidence of recurrence. In the case of relapsed or recurrent cancer, the tumors at risk include those previously treated with a targeted cancer therapy.

[0487] In one aspect of the invention, an anti-DLL3 ADC is administered to the patient before the adenocarcinoma fully transitions to a neuroendocrine phenotype, wherein the tumor is typically DLL3^{-/low}. In a related aspect, the anti-DLL3 ADC is administered before treatment with a targeted cancer therapy. In another aspect, the anti-DLL3 ADC is administered as a combination therapy with a targeted cancer therapy, wherein the administering occurs concurrently or consecutively with the anti-DLL3 ADC. In still another aspect the anti-DLL3 antibody is administered to a subject having a DLL3^{-/low} tumor before, after or concurrently with a chemotherapeutic regimen. In yet another aspect, the anti-DLL3 ADC is administered to the patient after the adenocarcinoma has developed resistance, or otherwise shows a risk of developing resistance, to a targeted cancer therapy.

[0488] By reducing or inhibiting recurrence is meant any significant decrease in disease recurrence as compared to a control. For example, a significant reduction of at least 5%, 10%, 15%, 20%, 25%, 30%, 40%, 50%, 60%, 70%, 80%, 85%, 90%, 95%, 96%, 97%, 98%, 99% or more as compared to a control. Alternatively, reducing or inhibiting recurrence can be any fold decrease of at least 1.5-fold, 2-fold, 3-fold, 4-fold, 5-fold, 6-fold, 7-fold, 8-fold, 9-fold, 10-fold, 12-fold, 14-fold, 16-fold, 20-fold or more as compared to a control. Representative controls include, for example, the rate of recurrence in a patient population receiving a given targeted therapy in the absence of anti-DLL3 ADC therapy.

[0489] A. Formulations and Routes of Administration

[0490] Depending on the form of the antibody drug conjugate, the mode of intended delivery, the disease being treated or monitored and numerous other variables, compositions of the invention may be formulated as desired using art-recognized techniques. In some embodiments, the therapeutic compositions of the invention may be administered neat or with a minimum of additional components while others may optionally be formulated to contain suitable pharmaceutically acceptable carriers comprising excipients and auxiliaries that are well known in the art (see, e.g., Gennaro, Remington: The Science and Practice of Pharmacy with Facts and Comparisons: Drugfacts Plus, 20th ed. (2003); Ansel et al., Pharmaceutical Dosage Forms and Drug Delivery Systems, 7^{th} ed., Lippencott Williams and Wilkins (2004); Kibbe et al., Handbook of Pharmaceutical Excipients, 3^{rd} ed., Pharmaceutical Press (2000)). Various pharmaceutically acceptable carriers, which include vehicles, adjuvants, and diluents, are readily available from numerous commercial sources. Moreover, an assortment of pharmaceutically acceptable auxiliary substances, such as pH adjusting and buffering agents, tonicity adjusting agents, stabilizers, wetting agents and the like, are also available. Certain non-limiting exemplary carriers include saline, buffered saline, dextrose, water, glycerol, ethanol, and combinations thereof.

[0491] More particularly it will be appreciated that, in some embodiments, the therapeutic compositions of the invention may be administered neat or with a minimum of additional components. Conversely the DLL3 antibody drug conjugates of the present invention may optionally be formulated to contain suitable pharmaceutically acceptable carriers comprising excipients and auxiliaries that are well known in the art and are relatively inert substances that facilitate administration of the antibody drug conjugate or which aid processing of the active compounds into preparations that are pharmaceutically optimized for delivery to the site of action. For example, an excipient can give form or consistency or act as a diluent to improve the pharmacokinetics or stability of the antibody drug conjugate. Suitable excipients or additives include, but are not limited to, stabilizing agents, wetting and emulsifying agents, salts for varying osmolarity, encapsulating agents, buffers, and skin penetration enhancers. In certain preferred embodiments the pharmaceutical compositions may be provided in a lyophilized form and reconstituted in, for example, buffered saline prior to administration.

[0492] Disclosed antibody drug conjugates for systemic administration may be formulated for enteral, parenteral or topical administration. Indeed, all three types of formulation may be used simultaneously to achieve systemic administration of the active ingredient. Excipients as well as formulations for parenteral and nonparenteral drug delivery are set forth in Remington, The Science and Practice of Pharmacy 20th Ed. Mack Publishing (2000). Suitable formulations for parenteral administration include aqueous solutions of the active compounds in water-soluble form, for example, water-soluble salts. In addition, suspensions of the active compounds as appropriate for oily injection suspensions may be administered. Suitable lipophilic solvents or vehicles include fatty oils, for example, hexylsubstituted poly(lactide), sesame oil, or synthetic fatty acid esters, for example, ethyl oleate or triglycerides. Aqueous injection suspensions may contain substances that increase the viscosity of the suspension and include, for example, sodium carboxymethyl cellulose, sorbitol, and/or dextran. Optionally, the suspension may also contain stabilizers. Liposomes can also be used to encapsulate the agent for delivery into the cell.

[0493] Suitable formulations for enteral administration include hard or soft gelatin capsules, pills, tablets, including coated tablets, elixirs, suspensions, syrups or inhalations and controlled release forms thereof.

[0494] In general the compounds and compositions of the invention, comprising DLL3 antibody drug conjugates may be administered in vivo, to a subject in need thereof, by various routes, including, but not limited to, oral, intravenous, intra-arterial, subcutaneous, parenteral, intranasal, intramuscular, intracranial, intracardiac, intraventricular, intratracheal, buccal, rectal, intraperitoneal, intradermal, topical, transdermal, and intrathecal, or otherwise by implantation or inhalation. The subject compositions may be formulated into preparations in solid, semi-solid, liquid, or gaseous forms; including, but not limited to, tablets, capsules, powders, granules, ointments, solutions, suppositories, enemas, injections, inhalants, and aerosols. The appropriate formulation and route of administration may be selected according to the intended application and therapeutic regimen.

[0495] B. Dosages

[0496] Similarly, the particular dosage regimen, i.e., dose, timing and repetition, will depend on the particular individual and that individual's medical history, as well as empirical considerations such as pharmacokinetics (e.g., half-life, clearance rate, etc.). Frequency of administration may be determined and adjusted over the course of therapy, and is based on reducing the number of proliferative or tumorigenic cells, maintaining the reduction of such neoplastic cells, reducing the proliferation of neoplastic cells, or delaying the development of metastasis. In other embodiments the dosage administered may be adjusted or attenuated to manage potential side effects and/or toxicity. Alternatively, sustained continuous release formulations of a subject therapeutic composition may be appropriate.

[0497] In general, the antibody drug conjugates may be administered in various ranges. These include about 10 μg/kg body weight to about 100 mg/kg body weight per dose; about 50 μg/kg body weight to about 5 mg/kg body weight per dose; about 100 μg/kg body weight to about 10 mg/kg body weight per dose. Other ranges include about 100 μg/kg body weight to about 20 mg/kg body weight per dose and about 0.5 mg/kg body weight to about 20 mg/kg body weight per dose. In certain embodiments, the dosage is at least about 100 μg/kg body weight, at least about 250 μg/kg body weight, at least about 750 μg/kg body weight, at least about 3 mg/kg body weight, at least about 5 mg/kg body weight, at least about 10 mg/kg body weight.

[0498] In selected embodiments the antibody drug conjugates will be administered at approximately 10, 20, 30, 40, 50, 60, 70, 80, 90 or 100 μg/kg body weight per dose. Other embodiments will comprise the administration of antibody drug conjugates at 200, 300, 400, 500, 600, 700, 800 or 900 μg/kg body weight per dose. In other preferred embodiments the antibody drug conjugates will be administered at 1, 2, 3, 4, 5, 6, 7, 8, 9 or 10 mg/kg. In still other embodiments the antibody drug conjugates may be administered at 12, 14, 16, 18 or 20 mg/kg body weight per dose. In yet other embodiments the antibody drug conjugates may be administered at 25, 30, 35, 40, 45, 50, 55, 60, 65, 70, 75, 80, 90 or 100 mg/kg body weight per dose. In accordance with the teachings herein one of skill in the art could readily determine appropriate dosages for various antibody drug conjugates based on preclinical animal studies, clinical observations and standard medical and biochemical techniques and measurements. In particularly preferred embodiments such antibody drug conjugate dosages will be administered intravenously over a period of time. Moreover, such dosages may be administered multiple times over a defined course of treatment.

[0499] Other dosing regimens may be predicated on Body Surface Area (BSA) calculations as disclosed in U.S. Pat. No. 7,744,877. As is well known, the BSA is calculated using the patient's height and weight and provides a measure of a subject's size as represented by the surface area of his or her body. In certain embodiments, the antibody drug conjugates may be administered in dosages from 10 mg/m² to 800 mg/m², from 50 mg/m² to 500 mg/m² and at dosages of 100 mg/m², 150 mg/m², 200 mg/m², 250 mg/m², 300 mg/m², 350 mg/m², 400 mg/m² or 450 mg/m². It will also be appreciated that art recognized and empirical techniques may be used to determine appropriate dosage.

[0500] In any event, DLL3 antibody drug conjugates are preferably administered as needed to subjects in need thereof. Determination of the frequency of administration may be made by persons skilled in the art, such as an attending physician based on considerations of the condition being treated, age of the subject being treated, severity of the condition being treated, general state of health of the subject being treated and the like. Generally, an effective dose of the DLL3 antibody drug conjugate is administered to a subject one or more times. More particularly, an effective dose of the antibody drug conjugate is administered to the subject once a month, more than once a month, or less than once a month. In certain embodiments, the effective dose of the DLL3 antibody drug conjugate may be administered multiple times, including for periods of at least a month, at least six months, at least a year, at least two years or a period of several years. In yet other embodiments, several days (2, 3, 4, 5, 6 or 7), several weeks (1, 2, 3, 4, 5, 6, 7 or 8) or several months (1, 2, 3, 4, 5, 6, 7 or 8) or even a year or several years may lapse between administration of the antibody drug conjugates.

[0501] In certain preferred embodiments the course of treatment involving antibody drug conjugates will comprise multiple doses of the selected drug product over a period of weeks or months. More specifically, antibody drug conjugates may administered once every day, every two days, every four days, every week, every ten days, every two weeks, every three weeks, every month, every six weeks, every two months, every ten weeks or every three months. In this regard it will be appreciated that the dosages may be altered or the interval may be adjusted based on patient response and clinical practices.

[0502] Dosages and regimens may also be determined empirically for the disclosed therapeutic compositions in individuals who have been given one or more administration(s). For example, individuals may be given incremental dosages of a therapeutic composition produced as described herein. In selected embodiments the dosage may be gradually increased or reduced or attenuated based respectively on empirically determined or observed side effects or toxicity. To assess efficacy of the selected composition, a marker of the specific disease, disorder or condition can be followed as described previously. In embodiments where the individual has cancer, these include direct measurements of tumor size via palpation or visual observation, indirect measurement of tumor size by x-ray or other imaging techniques; an improvement as assessed by direct tumor biopsy and microscopic examination of the tumor sample; the measurement of an indirect tumor marker (e.g., PSA for prostate cancer) or an antigen identified according to the methods described herein, a decrease in pain or paralysis; improved speech, vision, breathing or other disability associated with the tumor; increased appetite; or an increase in quality of life as measured by accepted tests or prolongation of survival. It will be apparent to one of skill in the art that the dosage will vary depending on the individual, the type of neoplastic condition, the stage of neoplastic condition, whether the neoplastic condition has begun to metastasize to other location in the individual, and the past and concurrent treatments being used.

[0503] C. Combination Therapies

[0504] As described herein, adenocarcinoma tumors are often heterogeneous and may comprise rare neuroendocrine cells that are resistant to targeted anti-cancer therapies. Accordingly, an effective therapeutic strategy comprises administering anti-DLL3 antibody drug conjugates as a combination therapy with anti-cancer agents. In one embodiment, the anti-DLL3 antibody drug conjugate is administered as a combination therapy with a targeted anti-cancer therapy (e.g. a targeted anti-cancer agent). In one aspect, the anti-DLL3 antibody drug conjugate may be administered simultaneously with a targeted anti-cancer therapy. In other aspects the administration of the anti-DLL3 antibody drug conjugate occurs after a tumor has become resistant to a targeted anti-cancer therapy. In yet other aspects, the administration of the anti-DLL3 antibody drug conjugate occurs before administration of a targeted anti-cancer therapy.

[0505] Combination therapies may be particularly useful in decreasing or inhibiting unwanted neoplastic cell proliferation, decreasing the occurrence of cancer, decreasing or preventing the recurrence of cancer, or decreasing or preventing the spread or metastasis of cancer. In such cases the antibody drug conjugates may function as sensitizing or chemosensitizing agents by removing the cancer cells that would otherwise prop up and perpetuate the tumor mass and thereby allow for more effective use of current standard of care debulking or anti-cancer agents. That is, the antibody drug conjugates may, in certain embodiments provide an enhanced effect (e.g., additive or synergistic in nature) that potentiates the mode of action of another administered therapeutic agent. In the context of the instant invention “combination therapy” shall be interpreted broadly and merely refers to the administration of an antibody drug conjugate and one or more anti-cancer agents that include, but are not limited to, cytotoxic agents, cytostatic agents, anti-angiogenic agents, debulking agents, chemotherapeutic agents, radiotherapy and radiotherapeutic agents, targeted anti-cancer therapies or agents (including both monoclonal antibodies and small molecule entities), BRMs, therapeutic antibodies, cancer vaccines, cytokines, hormone therapies, radiation therapy and anti-metastatic agents and immunotherapeutic agents, including both specific and non-specific approaches.

[0506] There is no requirement for the combined results to be additive of the effects observed when each treatment (e.g., antibody drug conjugate and anti-cancer agent) is conducted separately. Although at least additive effects are generally desirable, any increased anti-tumor effect above one of the single therapies is beneficial. Furthermore, the invention does not require the combined treatment to exhibit synergistic effects. However, those skilled in the art will appreciate that with certain selected combinations that comprise preferred embodiments, synergism may be observed.

[0507] In practicing combination therapy, the antibody drug conjugate and anti-cancer agent (e.g. a targeted anti-cancer therapy) may be administered to the subject simultaneously, either in a single composition, or as two or more distinct compositions using the same or different administration routes. Alternatively, the antibody drug conjugate may precede, or follow, the anti-cancer agent treatment by, e.g., intervals ranging from minutes to weeks. The time period between each delivery is such that the anti-cancer agent and antibody drug conjugate are able to exert a combined effect on the tumor. In at least one embodiment, both the anti-cancer agent and the antibody drug conjugate are administered within about 5 minutes to about two weeks of each other. In yet other embodiments, several days (2, 3, 4, 5, 6 or 7), several weeks (1, 2, 3, 4, 5, 6, 7 or 8) or several months (1, 2, 3, 4, 5, 6, 7 or 8) may lapse between administration of the antibody drug conjugate and the anti-cancer agent.

[0508] The combination therapy may be administered once, twice or at least for a period of time until the condition is treated, palliated or cured. In some embodiments, the combination therapy is administered multiple times, for example, from three times daily to once every six months. The administering may be on a schedule such as three times daily, twice daily, once daily, once every two days, once every three days, once weekly, once every two weeks, once every month, once every two months, once every three months, once every six months or may be administered continuously via a minipump. The combination therapy may be administered via any route, as noted previously. The combination therapy may be administered at a site distant from the site of the tumor.

[0509] In one embodiment an antibody drug conjugate is administered in combination with one or more anti-cancer agents (e.g. a targeted anti-cancer therapy) for a short treatment cycle to a subject in need thereof. The invention also contemplates discontinuous administration or daily doses divided into several partial administrations. The antibody drug conjugate and anti-cancer agent may be administered interchangeably, on alternate days or weeks; or a sequence of antibody drug conjugate treatments may be given, followed by one or more treatments of anti-cancer agent therapy. In any event, as will be understood by those of ordinary skill in the art, the appropriate doses of chemotherapeutic agents will be generally around those already employed in clinical therapies wherein the chemotherapeutics are administered alone or in combination with other chemotherapeutics.

[0510] In another preferred embodiment the anti-DLL3 antibody drug conjugates may be used in maintenance therapy to reduce or eliminate the chance of tumor recurrence following the initial presentation of the disease. Preferably the disorder will have been treated and the initial tumor mass eliminated, reduced or otherwise ameliorated so the patient is asymptomatic or in remission. At such time the subject may be administered pharmaceutically effective amounts of the disclosed antibody drug conjugates one or more times even though there is little or no indication of disease using standard diagnostic procedures. In some embodiments, the antibody drug conjugates will be administered on a regular schedule over a period of time, such as weekly, every two weeks, monthly, every six weeks, every two months, every three months every six months or annually. Given the teachings herein, one skilled in the art could readily determine favorable dosages and dosing regimens to reduce the potential of disease recurrence. Moreover such treatments could be continued for a period of weeks, months, years or even indefinitely depending on the patient response and clinical and diagnostic parameters.

[0511] In yet another preferred embodiment the antibody drug conjugates may be used to prophylactically or as an adjuvant therapy to prevent or reduce the possibility of tumor metastasis following a debulking procedure. As used in the instant disclosure a “debulking procedure” is defined broadly and shall mean any procedure, technique or method that eliminates, reduces, treats or ameliorates a tumor or tumor proliferation. Exemplary debulking procedures include, but are not limited to, surgery, radiation treatments (i.e., beam radiation), chemotherapy, immunotherapy or ablation. At appropriate times readily determined by one skilled in the art in view of the instant disclosure the disclosed antibody drug conjugates may be administered as suggested by clinical, diagnostic or theragnostic procedures to reduce tumor metastasis. The antibody drug conjugates may be administered one or more times at pharmaceutically effective dosages as determined using standard techniques. Preferably the dosing regimen will be accompanied by appropriate diagnostic or monitoring techniques that allow it to be modified.

[0512] D. Anti-Cancer Agents

[0513] The antibody drug conjugates may be used in combination with anti-cancer agents. The term “anti-cancer agent” or “anti-proliferative agent” means any agent that can be used to treat a cell proliferative disorder such as cancer, and includes, but is not limited to, cytotoxic agents, cytostatic agents, anti-angiogenic agents, debulking agents, chemotherapeutic agents, radiotherapy and radiotherapeutic agents, targeted anti-cancer agents, BRMs, therapeutic antibodies, cancer vaccines, cytokines, hormone therapies, radiation therapy and anti-metastatic agents and immunotherapeutic agents.

[0514] As used herein the term “cytotoxic agent” means a substance that is toxic to the cells and decreases or inhibits the function of cells and/or causes destruction of cells. Typically, the substance is a naturally occurring molecule derived from a living organism. Examples of cytotoxic agents include, but are not limited to, small molecule toxins or enzymatically active toxins of bacteria (e.g., Diptheria toxin, Pseudomonas endotoxin and exotoxin, Staphylococcal enterotoxin A), fungal (e.g., α-sarcin, restrictocin), plants (e.g., abrin, ricin, modeccin, viscumin, pokeweed anti-viral protein, saporin, gelonin, momoridin, trichosanthin, barley toxin, Aleurites fordii proteins, dianthin proteins, Phytolacca mericana proteins (PAPI, PAPII, and PAP-S), Momordica charantia inhibitor, curcin, crotin, saponaria officinalis inhibitor, gelonin, mitegellin, restrictocin, phenomycin, neomycin, and the tricothecenes) or animals, (e.g., cytotoxic RNases, such as extracellular pancreatic RNases; DNase I, including fragments and/or variants thereof).

[0515] For the purposes of the instant invention a “chemotherapeutic agent” comprises a chemical compound that non-specifically decreases or inhibits the growth, proliferation, and/or survival of cancer cells (e.g., cytotoxic or cytostatic agents). Such chemical agents are often directed to intracellular processes necessary for cell growth or division, and are thus particularly effective against cancerous cells, which generally grow and divide rapidly. For example, vincristine depolymerizes microtubules, and thus inhibits cells from entering mitosis. In general, chemotherapeutic agents can include any chemical agent that inhibits, or is designed to inhibit, a cancerous cell or a cell likely to become cancerous or generate tumorigenic progeny (e.g., TIC). Such agents are often administered, and are often most effective, in combination, e.g., in regimens such as CHOP or FOLFIRI.

[0516] Examples of anti-cancer agents that may be used in combination with the antibody drug conjugates include, but are not limited to, alkylating agents, alkyl sulfonates, aziridines, ethylenimines and methylamelamines, acetogenins, a camptothecin, bryostatin, callystatin, CC-1065, cryptophycins, dolastatin, duocarmycin, eleutherobin, pancratistatin, a sarcodictyin, spongistatin, nitrogen mustards, antibiotics, enediyne antibiotics, dynemicin, bisphosphonates, esperamicin, chromoprotein enediyne antiobiotic chromophores, aclacinomysins, actinomycin, authramycin, azaserine, bleomycins, cactinomycin, carabicin, carminomycin, carzinophilin, chromomycinis, dactinomycin, daunorubicin, detorubicin, 6-diazo-5-oxo-L-norleucine, ADRIAMYCIN® doxorubicin, epirubicin, esorubicin, idarubicin, marcellomycin, mitomycins, mycophenolic acid, nogalamycin, olivomycins, peplomycin, potfiromycin, puromycin, quelamycin, rodorubicin, streptonigrin, streptozocin, tubercidin, ubenimex, zinostatin, zorubicin; anti-metabolites, erlotinib, vemurafenib, crizotinib, ceritinib, sorafenib, ibrutinib, enzalutamide, folic acid analogues, purine analogs, androgens, anti-adrenals, folic acid replenisher such as frolinic acid, aceglatone, aldophosphamide glycoside, aminolevulinic acid, eniluracil, amsacrine, bestrabucil, bisantrene, edatraxate, defofamine, demecolcine, diaziquone, elfornithine, elliptinium acetate, an epothilone, etoglucid, gallium nitrate, hydroxyurea, lentinan, lonidainine, maytansinoids, mitoguazone, mitoxantrone, mopidanmol, nitraerine, pentostatin, phenamet, pirarubicin, losoxantrone, podophyllinic acid, 2-ethylhydrazide, procarbazine, PSK® polysaccharide complex (JHS Natural Products, Eugene, Oreg.), razoxane; rhizoxin; sizofiran; spirogermanium; tenuazonic acid; triaziquone; 2,2′,2″-trichlorotriethyl amine; trichothecenes (especially T-2 toxin, verracurin A, roridin A and anguidine); urethan; vindesine; dacarbazine; mannomustine; mitobronitol; mitolactol; pipobroman; gacytosine; arabinoside (“Ara-C”); cyclophosphamide; thiotepa; taxoids, chloranbucil; GEMZAR® gemcitabine; 6-thioguanine; mercaptopurine; methotrexate; platinum analogs, vinblastine; platinum; etoposide (VP-16); ifosfamide; mitoxantrone; vincristine; NAVELBINE® vinorelbine; novantrone; teniposide; edatrexate; daunomycin; aminopterin; xeloda; ibandronate; irinotecan (Camptosar, CPT-11), topoisomerase inhibitor RFS 2000; difluorometlhylornithine; retinoids; capecitabine; combretastatin; leucovorin; oxaliplatin; inhibitors of PKC-alpha, Raf, H-Ras, EGFR and VEGF-A that reduce cell proliferation and pharmaceutically acceptable salts, acids or derivatives of any of the above. Also included in this definition are anti-hormonal agents that act to regulate or inhibit hormone action on tumors such as anti-estrogens and selective estrogen receptor modulators, aromatase inhibitors that inhibit the enzyme aromatase, which regulates estrogen production in the adrenal glands, and anti-androgens; as well as troxacitabine (a 1,3-dioxolane nucleoside cytosine analog); antisense oligonucleotides, ribozymes such as a VEGF expression inhibitor and a HER2 expression inhibitor; vaccines, PROLEUKIN® rIL-2; LURTOTECAN® topoisomerase 1 inhibitor; ABARELIX® rmRH; Vinorelbine and Esperamicins and pharmaceutically acceptable salts, acids or derivatives of any of the above.

[0517] Particularly preferred anti-cancer agents comprise commercially or clinically available compounds such as erlotinib (TARCEVA®, Genentech/OSI Pharm.), docetaxel (TAXOTERE®, Sanofi-Aventis), 5-FU (fluorouracil, 5-fluorouracil, CAS No. 51-21-8), gemcitabine (GEMZAR®, Lilly), PD-0325901 (CAS No. 391210-10-9, Pfizer), cisplatin (cis-diamine, dichloroplatinum(II), CAS No. 15663-27-1), carboplatin (CAS No. 41575-94-4), paclitaxel (TAXOL®, Bristol-Myers Squibb Oncology, Princeton, N.J.), trastuzumab (HERCEPTIN®, Genentech), temozolomide (4-methyl-5-oxo-2,3,4,6,8-pentazabicyclo [4.3.0] nona-2,7,9-triene-9-carboxamide, CAS No. 85622-93-1, TEMODAR®, TEMODAL®, Schering Plough), tamoxifen ((Z)-2-[4-(1,2-diphenylbut-1-enyl)phenoxy]-N,N-dimethylethanamine, NOLVADEX®, ISTUBAL®, VALODEX®), and doxorubicin (ADRIAMYCIN®). Additional commercially or clinically available anti-cancer agents comprise oxaliplatin (ELOXATIN®, Sanofi), bortezomib (VELCADE®, Millennium Pharm.), sutent (SUNITINIB®, SU11248, Pfizer), letrozole (FEMARA®, Novartis), imatinib mesylate (GLEEVEC®, Novartis), XL-518 (Mek inhibitor, Exelixis, WO 2007/044515), ARRY-886 (Mek inhibitor, AZD6244, Array BioPharma, Astra Zeneca), SF-1126 (PI3K inhibitor, Semafore Pharmaceuticals), BEZ-235 (PI3K inhibitor, Novartis), XL-147 (PI3K inhibitor, Exelixis), PTK787/ZK 222584 (Novartis), fulvestrant (FASLODEX®, AstraZeneca), leucovorin (folinic acid), rapamycin (sirolimus, RAPAMUNE®, Wyeth), lapatinib (TYKERB®, GSK572016, Glaxo Smith Kline), lonafarnib (SARASAR™, SCH 66336, Schering Plough), sorafenib (NEXAVAR®, BAY43-9006, Bayer Labs), gefitinib (IRESSA®, AstraZeneca), irinotecan (CAMPTOSAR®, CPT-11, Pfizer), tipifarnib (ZARNESTRA™, Johnson & Johnson), ABRAXANE™ (Cremophor-free), albumin-engineered nanoparticle formulations of paclitaxel (American Pharmaceutical Partners, Schaumberg, II), vandetanib (rINN, ZD6474, ZACTIMA®, AstraZeneca), chloranmbucil, AG1478, AG1571 (SU 5271; Sugen), temsirolimus (TORISEL®, Wyeth), pazopanib (GlaxoSmithKline), canfosfamide (TELCYTA®, Telik), thiotepa and cyclosphosphamide (CYTOXAN®, NEOSAR®); vinorelbine (NAVELBINE®); capecitabine (XELODA®, Roche), tamoxifen (including NOLVADEX®; tamoxifen citrate, FARESTON® (toremifine citrate) MEGASE® (megestrol acetate), AROMASIN® (exemestane; Pfizer), formestanie, fadrozole, RIVISOR® (vorozole), FEMARA® (letrozole; Novartis), and ARIMIDEX® (anastrozole; AstraZeneca).

[0518] In other embodiments the antibody drug conjugates may be used in combination with any one of a number of antibodies (or immunotherapeutic agents) presently in clinical trials or commercially available. To this end the antibody drug conjugates may be used in combination with an antibody selected from the group consisting of abagovomab, adecatumumab, afutuzumab, alemtuzumab, altumomab, amatuximab, anatumomab, arcitumomab, bavituximab, bectumomab, bevacizumab, bivatuzumab, blinatumomab, brentuximab, cantuzumab, catumaxomab, cetuximab, citatuzumab, cixutumumab, clivatuzumab, conatumumab, daratumumab, drozitumab, duligotumab, dusigitumab, detumomab, dacetuzumab, dalotuzumab, ecromeximab, elotuzumab, ensituximab, ertumaxomab, etaracizumab, farletuzumab, ficlatuzumab, figitumumab, flanvotumab, futuximab, ganitumab, gemtuzumab, girentuximab, glembatumumab, ibritumomab, igovomab, imgatuzumab, indatuximab, inotuzumab, intetumumab, ipilimumab, iratumumab, labetuzumab, lexatumumab, lintuzumab, lorvotuzumab, lucatumumab, mapatumumab, matuzumab, milatuzumab, minretumomab, mitumomab, moxetumomab, narnatumab, naptumomab, necitumumab, nimotuzumab, nofetumomabn, ocaratuzumab, ofatumumab, olaratumab, onartuzumab, oportuzumab, oregovomab, panitumumab, parsatuzumab, patritumab, pemtumomab, pertuzumab, pintumomab, pritumumab, racotumomab, radretumab, rilotumumab, rituximab, robatumumab, satumomab, sibrotuzumab, siltuximab, simtuzumab, solitomab, tacatuzumab, taplitumomab, tenatumomab, teprotumumab, tigatuzumab, tositumomab, trastuzumab, tucotuzumab, ublituximab, veltuzumab, vorsetuzumab, votumumab, zalutumumab, CC49, 3F8 and combinations thereof.

[0519] Still other particularly preferred embodiments will comprise the use of antibodies approved for cancer therapy including, but not limited to, rituximab, trastuzumab, gemtuzumab ozogamcin, alemtuzumab, ibritumomab tiuxetan, tositumomab, bevacizumab, cetuximab, panitumumab, ofatumumab, ipilimumab and brentuximab vedotin. Those skilled in the art will be able to readily identify additional anti-cancer agents that are compatible with the teachings herein.

[0520] E. Radiotherapy

[0521] The present invention also provides for the combination of antibody drug conjugates with radiotherapy (i.e., any mechanism for inducing DNA damage locally within tumor cells such as gamma-irradiation, X-rays, UV-irradiation, microwaves, electronic emissions and the like). Combination therapy using the directed delivery of radioisotopes to tumor cells is also contemplated, and may be used in connection with a targeted anti-cancer agent or other targeting means. Typically, radiation therapy is administered in pulses over a period of time from about 1 to about 2 weeks. The radiation therapy may be administered to subjects having head and neck cancer for about 6 to 7 weeks. Optionally, the radiation therapy may be administered as a single dose or as multiple, sequential doses.

### IX. Indications

[0522] It will be appreciated that the anti-DLL3 antibody drug conjugates may be used to treat, prevent, manage, or inhibit the occurrence or recurrence of any DLL3⁺ cancer, as well as those cancers at risk for becoming DLL3⁺, for examples, those DLL3^{(-/low)} tumors at risk of neuroendocrine transition as described herein.

[0523] Accordingly, whether administered alone or in combination with an anti-cancer agent or radiotherapy, the antibody drug conjugates are particularly useful for generally treating neoplastic conditions in patients or subjects which may include benign or malignant tumors (e.g., adrenal, liver, kidney, bladder, breast, gastric, ovarian, colorectal, prostate, pancreatic, lung, thyroid, hepatic, cervical, endometrial, esophageal and uterine carcinomas; sarcomas; glioblastomas; and various head and neck tumors); leukemias and lymphoid malignancies; other disorders such as neuronal, glial, astrocytal, hypothalamic and other glandular, macrophagal, epithelial, stromal and blastocoelic disorders; and inflammatory, angiogenic, immunologic disorders and disorders caused by pathogens. Particularly, key targets for treatment are neoplastic conditions comprising solid tumors, although hematologic malignancies are within the scope of the invention. Preferably the “subject” or “patient” to be treated will be human although, as used herein, the terms are expressly held to comprise any mammalian species.

[0524] More specifically, neoplastic conditions subject to treatment in accordance with the instant invention may be selected from the group including, but not limited to, adrenal gland tumors, AIDS-associated cancers, alveolar soft part sarcoma, astrocytic tumors, bladder cancer (squamous cell carcinoma and transitional cell carcinoma), bone cancer (adamantinoma, aneurismal bone cysts, osteochondroma, osteosarcoma), brain and spinal cord cancers, metastatic brain tumors, breast cancer, carotid body tumors, cervical cancer, chondrosarcoma, chordoma, chromophobe renal cell carcinoma, clear cell carcinoma, colon cancer, colorectal cancer, cutaneous benign fibrous histiocytomas, desmoplastic small round cell tumors, ependymomas, Ewing's tumors, extraskeletal myxoid chondrosarcoma, fibrogenesis imperfecta ossium, fibrous dysplasia of the bone, gallbladder and bile duct cancers, gestational trophoblastic disease, germ cell tumors, head and neck cancers, islet cell tumors, Kaposi's Sarcoma, kidney cancer (nephroblastoma, papillary renal cell carcinoma), leukemias, lipoma/benign lipomatous tumors, liposarcoma/malignant lipomatous tumors, liver cancer (hepatoblastoma, hepatocellular carcinoma), lymphomas, lung cancers (small cell carcinoma, adenocarcinoma, squamous cell carcinoma, large cell carcinoma etc.), medulloblastoma, melanoma, meningiomas, multiple endocrine neoplasia, multiple myeloma, myelodysplastic syndrome, neuroblastoma, neuroendocrine tumors, ovarian cancer, pancreatic cancers, papillary thyroid carcinomas, parathyroid tumors, pediatric cancers, peripheral nerve sheath tumors, phaeochromocytoma, pituitary tumors, prostate cancer, posterious unveal melanoma, rare hematologic disorders, renal metastatic cancer, rhabdoid tumor, rhabdomysarcoma, sarcomas, skin cancer, soft-tissue sarcomas, squamous cell cancer, stomach cancer, synovial sarcoma, testicular cancer, thymic carcinoma, thymoma, thyroid metastatic cancer, and uterine cancers (carcinoma of the cervix, endometrial carcinoma, and leiomyoma).

[0525] In certain preferred embodiments the proliferative disorder will comprise a solid tumor including, but not limited to, adrenal, liver, kidney, bladder, breast, gastric, ovarian, cervical, uterine, esophageal, colorectal, prostate, pancreatic, lung (both small cell and non-small cell), thyroid, carcinomas, sarcomas, glioblastomas and various head and neck tumors. In other preferred embodiments, the antibody drug conjugates are especially effective at treating small cell lung cancer (SCLC) and non-small cell lung cancer (NSCLC) (e.g., squamous cell non-small cell lung cancer or squamous cell small cell lung cancer). In one embodiment, the lung cancer is refractory, relapsed or resistant to a platinum based agent (e.g., carboplatin, cisplatin, oxaliplatin, topotecan) and/or a taxane (e.g., docetaxel, paclitaxel, larotaxel or cabazitaxel). With regard to small cell lung cancer particularly preferred embodiments will comprise the administration of antibody drug conjugates. In selected embodiments the antibody drug conjugates will be administered to patients exhibiting limited stage disease. In other embodiments the antibody drug conjugates will be administered to patients exhibiting extensive stage disease. In other preferred embodiments the antibody drug conjugates will be administered to refractory patients (i.e., those who recur during or shortly after completing a course of initial therapy). Still other embodiments comprise the administration of the antibody drug conjugates to sensitive patients (i.e, those whose relapse is longer than 2-3 months after primary therapy).

[0526] As discussed above the anti-DLL3 antibody drug conjugates may be used to prevent, treat or diagnose tumors with neuroendocrine features or phenotypes including neuroendocrine tumors. The anti-DLL3 antibody drug conjugates may also be used to treat tumors that are at risk of transitioning to a neuroendocrine phenotype, which is identifiable by the risk factors disclosed herein. Accordingly, the anti-DLL3 antibody drug conjugates may be used to treat tumors of any of the foregoing cancer types, which are characterized at risk for neuroendocrine transition by the changes in biomarker expression and/or having previously received a targeted therapy. In particular aspects of the invention, tumors at risk of neuroendocrine transition include adenocarcinoma arising in the lung, prostate, bladder, kidney, genitourinary tract, including bladder, prostate, ovary, cervix, and endometrium; gastrointestinal tract, including colon, and stomach; thyroid, including medullary thyroid cancer; and lung, including small cell lung carcinoma and large cell neuroendocrine carcinoma.

### X. Articles of Manufacture

[0527] The invention includes pharmaceutical packs and kits comprising one or more containers or receptacles, wherein a container can comprise one or more doses of an antibody or ADC of the invention. Such kits or packs may be diagnostic or therapeutic in nature. In certain embodiments, the pack or kit contains a unit dosage, meaning a predetermined amount of a composition comprising, for example, an antibody or ADC of the invention, with or without one or more additional agents and optionally, one or more anti-cancer agents. In certain other embodiments, the pack or kit contains a detectable amount of an anti-DLL3 antibody, an anti-ASCL1 antibody, or an anti-DLL3 ADC, with or without an associated reporter molecule and optionally one or more additional agents for the detection, quantitation and/or visualization of cancerous cells. In yet other embodiments kits compatible with the instant invention may comprise one or more agents useful for detecting a marker selected from the group consisting of Achaete-scute Homolog 1 (ASCL1), Paternally Expressed 10 (PEG10), or Serine/Arginine Repetitive Matrix 4 (SRRM4), Retinoblastoma 1 (RB1), Repressor Element-1 Silencing Transcription Factor (REST), SAM Pointed Domain-containing Ets Transcription Factor (SPDEF), Prostaglandin E2 Receptor 4 (PTGER4) and ETS-Related Gene (ERG).

[0528] In any event kits of the invention will generally comprise an antibody or ADC of the invention in a suitable container or receptacle a pharmaceutically acceptable formulation and, optionally, one or more anti-cancer agents in the same or different containers. The kits may also contain other pharmaceutically acceptable formulations or devices, either for diagnosis or combination therapy. Examples of diagnostic devices or instruments include those that can be used to detect, monitor, quantify or profile cells or markers associated with proliferative disorders (for a full list of such markers, see above). In some embodiments the devices may be used to detect, monitor and/or quantify circulating tumor cells either in vivo or in vitro (see, for example, WO 2012/0128801). In still other embodiments the circulating tumor cells may comprise tumorigenic cells. The kits contemplated by the invention can also contain appropriate reagents to combine the antibody or ADC of the invention with an anti-cancer agent or diagnostic agent (e.g., see U.S. Pat. No. 7,422,739).

[0529] When the components of the kit are provided in one or more liquid solutions, the liquid solution can be non-aqueous, though typically an aqueous solution is preferred, with a sterile aqueous solution being particularly preferred. The formulation in the kit can also be provided as dried powder(s) or in lyophilized form that can be reconstituted upon addition of an appropriate liquid. The liquid used for reconstitution can be contained in a separate container. Such liquids can comprise sterile, pharmaceutically acceptable buffer(s) or other diluent(s) such as bacteriostatic water for injection, phosphate-buffered saline, Ringer's solution or dextrose solution. Where the kit comprises the antibody or ADC of the invention in combination with additional therapeutics or agents, the solution may be pre-mixed, either in a molar equivalent combination, or with one component in excess of the other. Alternatively, the antibody or ADC of the invention and any optional anti-cancer agent or other agent can be maintained separately within distinct containers prior to administration to a patient.

[0530] The kit can comprise one or multiple containers or receptacles and a label or package insert in, on or associated with the container(s), indicating that the enclosed composition is used for diagnosing or treating the disease condition of choice (e.g., cancer). Suitable containers include, for example, bottles, vials, syringes, infusion bags (i.v. bags), etc. The containers can be formed from a variety of materials such as glass or pharmaceutically compatible plastics. In certain embodiments the container(s) can comprise a sterile access port, for example, the container may be an intravenous solution bag or a vial having a stopper that can be pierced by a hypodermic injection needle.

[0531] In some embodiments the kit can contain a means by which to administer the antibody and any optional components to a patient, e.g., one or more needles or syringes (pre-filled or empty), an eye dropper, pipette, or other such like apparatus, from which the formulation may be injected or introduced into the subject or applied to a diseased area of the body. The kits of the invention will also typically include a means for containing the vials, or such like, and other components in close confinement for commercial sale, such as, e.g., blow-molded plastic containers into which the desired vials and other apparatus are placed and retained.

### XI. Miscellaneous

[0532] Unless otherwise defined herein, scientific and technical terms used in connection with the invention shall have the meanings that are commonly understood by those of ordinary skill in the art. Further, unless otherwise required by context, singular terms shall include pluralities and plural terms shall include the singular. In addition, ranges provided in the specification and appended claims include both end points and all points between the end points. Therefore, a range of 2.0 to 3.0 includes 2.0, 3.0, and all points between 2.0 and 3.0.

[0533] Generally, techniques of cell and tissue culture, molecular biology, immunology, microbiology, genetics and chemistry described herein are those well known and commonly used in the art. The nomenclature used herein, in association with such techniques, is also commonly used in the art. The methods and techniques of the invention are generally performed according to conventional methods well known in the art and as described in various references that are cited throughout the present specification unless otherwise indicated.

### XII. References

[0534] The complete disclosure of all patents, patent applications, and publications, and electronically available material (including, for example, nucleotide sequence submissions in, e.g., GenBank and RefSeq, and amino acid sequence submissions in, e.g., SwissProt, PIR, PRF, PDB, and translations from annotated coding regions in GenBank and RefSeq) cited herein are incorporated by reference, regardless of whether the phrase “incorporated by reference” is or is not used in relation to the particular reference. The foregoing detailed description and the examples that follow have been given for clarity of understanding only. No unnecessary limitations are to be understood therefrom. The invention is not limited to the exact details shown and described. Variations obvious to one skilled in the art are included in the invention defined by the claims. Any section headings used herein are for organizational purposes only and are not to be construed as limiting the subject matter described method.

### XIII. Sequences

[0535] Appended to the instant application are figures and a sequence listing comprising a number of nucleic acid and amino acid sequences. The following Table 3 provides a summary of the included sequences.

TABLE 3

| SEQ ID NO. | Description |
|---|---|
| 1 | DLL3 isoform 1 protein |
| 2 | DLL3 isoform 2 protein |
| 3 | Epitope SC16.23 protein |
| 4 | Epitope SC16.34 & SC 16.56 protein |
| 5 | Kappa constant region protein |
| 6 | IgGI constant region protein |
| 7-19 | reserved |
| 20 | SC16.3 VL DNA (aligned with encoded protein) |
| 21 | SC16.3 VL protein |
| 22 | SC16.3 VH DNA (aligned with encoded protein) |
| 23 | SC16.3 VH protein |
| 24-387 | Additional murine clones as in SEQ ID NOs: 20-23 |
| 388-407 | Humanized clones as in SEQ ID NOs: 20-23 |
| 408, 409, 410 | hSC16.13 CDRL1, CDRL2, CDRL3 |
| 411, 412, 413 | hSC16.13 CDRH1, CDRH2, CDRH3 |
| 414, 415, 416 | hSC16.15 CDRL1, CDRL2, CDRL3 |
| 417, 418, 419 | hSC16.15 CDRH1, CDRH2, CDRH3 |
| 420, 421, 422 | hSC16.25 CDRL1, CDRL2, CDRL3 |
| 423, 424, 425 | hSC16.25 CDRH1, CDRH2, CDRH3 |
| 426, 427, 428 | hSC16.34 CDRL1, CDRL2, CDRL3 |
| 429, 430, 431 | hSC16.34 CDRH1, CDRH2, CDRH3 |
| 432, 433, 434 | hSC16.56 CDRL1, CDRL2, CDRL3 |
| 435, 436, 437 | hSC16.56 CDRH1, CDRH2, CDRH3 |
| 438-519 | reserved |
| 520 | SC72.2 VL DNA |
| 521 | SC72.2 VL protein |
| 522 | SC72.2 VH DNA |
| 523 | SC72.2 VH protein |
| 524-571 | Additional ASCL1 murine clones as in SEQ ID NOs: |
| | 520-523 |
| 572 | SC72.93 VH DNA |
| 573 | SC72.93 VH protein |

[0536] As discussed in Example 2 below, Table 3 above may further be used to designate SEQ ID NOS for exemplary Kabat CDRs delineated in FIGS. 1A and 1B. More particularly FIGS. 1A and 1B denote the three Kabat CDRs of each heavy (CDRH) and light (CDRL) chain variable region sequence and Table 3 above provides for assignment of a SEQ ID designation that may be applied to each CDRL1, CDRL2 and CDRL3 of the light chain and each CDRH1, CDRH2 and CDRH3 of the heavy chain. Using this methodology each unique CDR set forth in FIGS. 1A and 1B (and also in FIGS. 3A and 3B) may be assigned a sequential SEQ ID NO and can be used to provide the derived antibodies of the instant invention.

### XIV. Tumor Listing

[0537] PDX tumor cell types are denoted by an abbreviation followed by a number, which indicates the particular tumor cell line. The passage number of the tested sample is indicated by p0-p# appended to the sample designation where p0 is indicative of an unpassaged sample obtained directly from a patient tumor and p# is indicative of the number of times the tumor has been passaged through a mouse prior to testing. As used herein, the abbreviations of the tumor types and subtypes are shown in Table 4 as follows:

TABLE 4

| Tumor Type | Abbreviation | Tumor subtype | Abbreviation |
|---|---|---|---|
| Breast | BR | estrogen receptor positive | BR-ERPR |
| | | and/or progesterone | |
| | | receptor positive | |
| | | ERBB2/Neu positive | BR- ERBB2/ |
| | | | Neu |
| | | HER2 positive | BR-HER2 |
| | | triple-negative | TNBC |
| | | claudin subtype of triple- | TNBC-CLDN |
| | | negative | |
| colorectal | CR | | |
| endometrial | EN | | |
| gastric | GA | diffuse adenocarcinoma | GA-Ad-Dif/ |
| | | | Muc |
| | | intestinal adenocarcinoma | GA-Ad-Int |
| | | stromal tumors | GA-GIST |
| glioblastoma | GB | | |
| head and | HN | | |
| neck | | | |
| kidney | KDY | clear renal cell carcinoma | KDY-CC |
| | | papillary renal cell | KDY-PAP |
| | | carcinoma | |
| | | transitional cell or | KDY-URO |
| | | urothelial carcinoma | |
| | | unknown | KDY-UNK |
| liver | LIV | hepatocellular carcinoma | LIV-HCC |
| | | cholangiocarcinoma | LIV-CHOL |
| lymphoma | LN | | |
| lung | LU | adenocarcinoma | LU-Ad |
| | | carcinoid | LU-CAR |
| | | large cell neuroendocrine | LU-LCC |
| | | non-small cell | NSCLC |
| | | squamous cell | LU-SCC |
| | | small cell | SCLC |
| | | spindle cell | LU-SPC |
| melanoma | MEL | | |
| ovarian | OV | clear cell | OV-CC |
| | | endometroid | OV-END |
| | | mixed subtype | OV-MIX |
| | | malignant mixed | OV-MMMT |
| | | mesodermal | |
| | | mucinous | OV-MUC |
| | | neuroendocrine | OV-NET |
| | | papillary serous | OV-PS |
| | | serous | OV-S |
| | | small cell | OV-SC |
| | | transitional cell carcinoma | OV-TCC |
| pancreatic | PA | acinar cell carcinoma | PA-ACC |
| | | duodenal carcinoma | PA-DC |
| | | mucinous adenocarcinoma | PA-MAD |
| | | neuroendocrine | PA-NET |
| | | adenocarcinoma | PA-PAC |
| | | adenocarcinoma exocrine | PA-PACe |
| | | type | |
| | | ductal adenocarcinoma | PA-PDAC |
| | | ampullary adenocarcinoma | PA-AAC |
| prostate | PR | | |
| skin | SK | melanoma | MEL |
| | | squamous cell carcinomas | SK-SCC |

### EXAMPLES

[0538] The invention, thus generally described above, will be understood more readily by reference to the following examples, which are provided by way of illustration and are not intended to be limiting of the instant invention. The examples are not intended to represent that the experiments below are all or the only experiments performed. Unless indicated otherwise, parts are parts by weight, molecular weight is weight average molecular weight, temperature is in degrees Centigrade, and pressure is at or near atmospheric.

### Example 1

### Generation of Murine Anti-DLL3 Antibodies

[0539] Anti-DLL3 murine antibodies were produced as follows. In a first immunization campaign, three mice (one from each of the following strains: Balb/c, CD-1, FVB) were inoculated with human DLL3-fc protein (hDLL3-Fc) emulsified with an equal volume of TiterMax® or alum adjuvant. The hDLL3-Fc fusion construct was purchased from Adipogen International (Catalog No. AG-40A-0113). An initial immunization was performed with an emulsion of 10 μg hDLL3-Fc per mouse in TiterMax. Mice were then boosted biweekly with 5 μg hDLL3-Fc per mouse in alum adjuvant. The final injection prior to fusion was with 5 μg hDLL3-Fc per mouse in PBS.

[0540] In a second immunization campaign six mice (two each of the following strains: Balb/c, CD-1, FVB), were inoculated with human DLL3-His protein (hDLL3-His), emulsified with an equal volume of TiterMax® or alum adjuvant. Recombinant hDLL3-His protein was purified from the supernatants of CHO—S cells engineered to overexpress hDLL3-His. The initial immunization was with an emulsion of 10 μg hDLL3-His per mouse in TiterMax. Mice were then boosted biweekly with 5 μg hDLL3-His per mouse in alum adjuvant. The final injection was with 2×10⁵ HEK-293T cells engineered to overexpress hDLL3.

[0541] Solid-phase ELISA assays were used to screen mouse sera for mouse IgG antibodies specific for human DLL3. A positive signal above background was indicative of antibodies specific for DLL3. Briefly, 96 well plates (VWR International, Cat. #610744) were coated with recombinant DLL3-His at 0.5 μg/ml in ELISA coating buffer overnight. After washing with PBS containing 0.02% (v/v) Tween 20, the wells were blocked with 3% (w/v) BSA in PBS, 200 μL/well for 1 hour at room temperature (RT). Mouse serum was titrated (1:100, 1:200, 1:400, and 1:800) and added to the DLL3 coated plates at 50 μL/well and incubated at RT for 1 hour. The plates are washed and then incubated with 50 μL/well HRP-labeled goat anti-mouse IgG diluted 1:10,000 in 3% BSA-PBS or 2% FCS in PBS for 1 hour at RT. Again the plates were washed and 40 μL/well of a TMB substrate solution (Thermo Scientific 34028) was added for 15 minutes at RT. After developing, an equal volume of 2N H₂SO₄ was added to stop substrate development and the plates were analyzed by spectrophotometer at OD 450.

[0542] Sera-positive immunized mice were sacrificed and draining lymph nodes (popliteal, inguinal, and medial iliac) were dissected and used as a source for antibody producing cells. Cell suspensions of B cells (approximately 229×10⁶ cells from the hDLL3-Fc immunized mice, and 510×10⁶ cells from the hDLL3-His immunized mice) were fused with non-secreting P3×63Ag8.653 myeloma cells at a ratio of 1:1 by electro cell fusion using a model BTX Hybrimmune System (BTX Harvard Apparatus). Cells were re-suspended in hybridoma selection medium consisting of DMEM medium supplemented with azaserine, 15% fetal clone I serum, 10% BM Condimed (Roche Applied Sciences), 1 mM nonessential amino acids, 1 mM HEPES, 100 IU penicillin-streptomycin, and 50 μM 2-mercaptoethanol, and were cultured in four T225 flasks in 100 mL selection medium per flask. The flasks were placed in a humidified 37° C. incubator containing 5% CO₂ and 95% air for six to seven days.

[0543] On day six or seven after the fusions the hybridoma library cells were collected from the flasks and plated at one cell per well (using the FACSAria I cell sorter) in 200 μL of supplemented hybridoma selection medium (as described above) into 64 Falcon 96-well plates, and 48 96-well plates for the hDLL3-His immunization campaign. The rest of the library was stored in liquid nitrogen.

[0544] The hybridomas were cultured for 10 days and the supernatants were screened for antibodies specific to hDLL3 using flow cytometry performed as follows. 1×10⁵ per well of HEK-293T cells engineered to overexpress human DLL3, mouse DLL3 (pre-stained with dye), or cynomolgus DLL3 (pre-stained with Dylight800) were incubated for 30 minutes with 25 μL hybridoma supernatant. Cells were washed with PBS/2% FCS and then incubated with 25 μL per sample DyeLight 649 labeled goat-anti-mouse IgG, Fc fragment specific secondary diluted 1:300 in PBS/2% FCS. After a 15 minute incubation cells were washed twice with PBS/2% FCS and re-suspended in PBS/2% FCS with DAPI and analyzed by flow cytometry for fluorescence exceeding that of cells stained with an isotype control antibody. Remaining unused hybridoma library cells were frozen in liquid nitrogen for future library testing and screening.

[0545] The hDLL3-His immunization campaign yielded approximately 50 murine anti-hDLL3 antibodies and the hDLL3-Fc immunization campaign yielded approximately 90 murine anti-hDLL3 antibodies.

### Example 2

### Sequencing of Anti-DLL3 Antibodies

[0546] Based on the foregoing, a number of exemplary distinct monoclonal antibodies that bind immobilized human DLL3 or h293-hDLL3 cells with apparently high affinity were selected for sequencing and further analysis. Sequence analysis of the light chain variable regions and heavy chain variable regions from selected monoclonal antibodies generated in Example 1 confirmed that many had novel complementarity determining regions and often displayed novel VDJ arrangements.

[0547] Initially selected hybridoma cells expressing the desired antibodies were lysed in Trizol® reagent (Trizol® Plus RNA Purification System, Life Technologies) to prepare the RNA encoding the antibodies. Between 10⁴ and 10⁵ cells were re-suspended in 1 mL Trizol and shaken vigorously after addition of 200 μL chloroform. Samples were then centrifuged at 4° C. for 10 minutes and the aqueous phase was transferred to a fresh microfuge tube and an equal volume of 70% ethanol was added. The sample was loaded on an RNeasy Mini spin column, placed in a 2 mL collection tube and processed according to the manufacturer's instructions. Total RNA was extracted by elution, directly to the spin column membrane with 100 μL RNase-free water. The quality of the RNA preparations was determined by fractionating 3 μL in a 1% agarose gel before being stored at −80° C. until used.

[0548] The variable region of the Ig heavy chain of each hybridoma was amplified using a 5′ primer mix comprising 32 mouse specific leader sequence primers designed to target the complete mouse VH repertoire in combination with a 3′ mouse Cγ primer specific for all mouse Ig isotypes. Similarly, a primer mix containing thirty two 5′ Vκ leader sequences designed to amplify each of the Vκ mouse families was used in combination with a single reverse primer specific to the mouse kappa constant region in order to amplify and sequence the kappa light chain. For antibodies containing a lambda light chain, amplification was performed using three 5′ VL leader sequences in combination with one reverse primer specific to the mouse lambda constant region. The VH and VL transcripts were amplified from 100 ng total RNA using the Qiagen One Step RT-PCR kit as follows. A total of eight RT-PCR reactions were run for each hybridoma, four for the Vκ light chain and four for the Vγ heavy chain. PCR reaction mixtures included 3 μL of RNA, 0.5 μL of 100 μM of either heavy chain or kappa light chain primers (custom synthesized by Integrated Data Technologies), 5 μL of 5×RT-PCR buffer, 1 μL dNTPs, 1 μL of enzyme mix containing reverse transcriptase and DNA polymerase, and 0.4 μL of ribonuclease inhibitor RNasin (1 unit). The thermal cycler program was RT step 50° C. for 30 minutes, 95° C. for 15 minutes followed by 30 cycles of (95° C. for 30 seconds, 48° C. for 30 seconds, 72° C. for 1 minute). There was then a final incubation at 72° C. for 10 minutes.

[0549] The extracted PCR products were sequenced using the same specific variable region primers as described above for the amplification of the variable regions. To prepare the PCR products for direct DNA sequencing, they were purified using the QIAquick™ PCR Purification Kit (Qiagen) according to the manufacturer's protocol. The DNA was eluted from the spin column using 50 μL of sterile water and then sequenced directly from both strands (MCLAB).

[0550] Selected nucleotide sequences were analyzed using the IMGT sequence analysis tool (http://www.imgt.org/IMGTmedical/sequence_analysis.html) to identify germline V, D and J gene members with the highest sequence homology. These derived sequences were compared to known germline DNA sequences of the Ig V- and J-regions by alignment of VH and VL genes to the mouse germline database using a proprietary antibody sequence database.

[0551] FIG. 1A depicts the contiguous amino acid sequences of numerous novel murine light chain variable regions from anti-DLL3 antibodies and exemplary humanized light chain variable regions derived from the variable light chains of representative murine anti-DLL3 antibodies (as per Example 3 below). FIG. 1B depicts the contiguous amino acid sequences of novel murine heavy chain variable regions from the same anti-DLL3 antibodies and humanized heavy chain variable regions derived from the same murine antibodies providing the humanized light chains (as per Example 3 below). Murine light and heavy chain variable region amino acid sequences are provided in SEQ ID NOS: 21-387, odd numbers while humanized light and heavy chain variable region amino acid sequences are provided in SEQ ID NOS: 389-407, odd numbers.

[0552] Thus, taken together FIGS. 1A and 1B provide the annotated sequences of numerous murine anti-DLL3 binding or targeting domains, termed SC16.3, SC16.4, SC16.5, SC16.7, SC16.8, SC16.10, SC16.11, SC16.13, SC16.15, SC16.18, SC16.19, SC16.20, SC16.21, SC16.22, SC16.23, SC16.25, SC16.26, SC16.29, SC16.30, SC16.31, SC16.34, SC16.35, SC16.36, SC16.38, SC16.41, SC16.42, SC16.45, SC16.47, SC16.49, SC16.50, SC16.52, SC16.55, SC16.56, SC16.57, SC16.58, SC16.61, SC16.62, SC16.63, SC16.65, SC16.67, SC16.68, SC16.72, SC16.73, SC16.78, SC16.79, SC16.80, SC16.81, SC16.84, SC16.88, SC16.101, SC16.103, SC16.104, SC16.105, SC16.106, SC16.107, SC16.108, SC16.109, SC16.110, SC16.111, SC16.113, SC16.114, SC16.115, SC16.116, SC16.117, SC16.118, SC16.120, SC16.121, SC16.122, SC16.123, SC16.124, SC16.125, SC16.126, SC16.129, SC16.130, SC16.131, SC16.132, SC16.133, SC16.134, SC16.135, SC16.136, SC16.137, SC16.138, SC16.139, SC16.140, SC16.141, SC16.142, SC16.143, SC16.144, SC16.147, SC16.148, SC16.149 and SC16.150 and humanized antibodies, termed hSC16.13, hSC16.15, hSC16.25, hSC16.34 and hSC16.56.

[0553] In particular aspects of the invention the ADC binding domain binds specifically to hDLL3 and comprises or competes for binding with an antibody comprising: a light chain variable region (VL) of SEQ ID NO: 21 and a heavy chain variable region (VH) of SEQ ID NO: 23; or a VL of SEQ ID NO: 25 and a VH of SEQ ID NO: 27; or a VL of SEQ ID NO: 29 and a VH of SEQ ID NO: 31; or a VL of SEQ ID NO: 33 and a VH of SEQ ID NO: 35; or a VL of SEQ ID NO: 37 and a VH of SEQ ID NO: 39; or a VL of SEQ ID NO: 41 and a VH of SEQ ID NO: 43; or a VL of SEQ ID NO: 45 and a VH of SEQ ID NO: 47; or a VL of SEQ ID NO: 49 and a VH of SEQ ID NO: 51; or a VL of SEQ ID NO: 53 and a VH of SEQ ID NO: 55; or a VL of SEQ ID NO: 57 and a VH of SEQ ID NO: 59; or a VL of SEQ ID NO: 61 and a VH of SEQ ID NO: 63; or a VL of SEQ ID NO: 65 and a VH of SEQ ID NO: 67; or a VL of SEQ ID NO: 69 and a VH of SEQ ID NO: 71; or a VL of SEQ ID NO: 73 and a VH of SEQ ID NO: 75; or a VL of SEQ ID NO: 77 and a VH of SEQ ID NO: 79; or a VL of SEQ ID NO: 81 and a VH of SEQ ID NO: 83; or a VL of SEQ ID NO: 85 and a VH of SEQ ID NO: 87; or a VL of SEQ ID NO: 89 and a VH of SEQ ID NO: 91; or a VL of SEQ ID NO: 93 and a VH of SEQ ID NO: 95; or a VL of SEQ ID NO: 97 and a VH of SEQ ID NO: 99; or a VL of SEQ ID NO: 101 and a VH of SEQ ID NO: 103; or a VL of SEQ ID NO: 105 and a VH of SEQ ID NO: 107; or a VL of SEQ ID NO: 109 and a VH of SEQ ID NO: 111; or a VL of SEQ ID NO: 113 and a VH of SEQ ID NO: 115; or a VL of SEQ ID NO: 117 and a VH of SEQ ID NO: 119; or a VL of SEQ ID NO: 121 and a VH of SEQ ID NO: 123; or a VL of SEQ ID NO: 125 and a VH of SEQ ID NO: 127; or a VL of SEQ ID NO: 129 and a VH of SEQ ID NO: 131; or a VL of SEQ ID NO: 133 and a VH of SEQ ID NO: 135; or a VL of SEQ ID NO: 137 and a VH of SEQ ID NO: 139; or a VL of SEQ ID NO: 141 and a VH of SEQ ID NO: 143; or a VL of SEQ ID NO: 145 and a VH of SEQ ID NO: 147; or a VL of SEQ ID NO: 149 and a VH of SEQ ID NO: 151; or a VL of SEQ ID NO: 153 and a VH of SEQ ID NO: 155; or a VL of SEQ ID NO: 157 and a VH of SEQ ID NO: 159; or a VL of SEQ ID NO: 161 and a VH of SEQ ID NO: 163; or a VL of SEQ ID NO: 165 and a VH of SEQ ID NO: 167; or a VL of SEQ ID NO: 169 and a VH of SEQ ID NO: 171; or a VL of SEQ ID NO: 173 and a VH of SEQ ID NO: 175; or a VL of SEQ ID NO: 177 and a VH of SEQ ID NO: 179; or a VL of SEQ ID NO: 181 and a VH of SEQ ID NO: 183; or a VL of SEQ ID NO: 185 and a VH of SEQ ID NO: 187; or a VL of SEQ ID NO: 189 and a VH of SEQ ID NO: 191; or a VL of SEQ ID NO: 193 and a VH of SEQ ID NO: 195; or a VL of SEQ ID NO: 197 and a VH of SEQ ID NO: 199; or a VL of SEQ ID NO: 201 and a VH of SEQ ID NO: 203; or a VL of SEQ ID NO: 205 and a VH of SEQ ID NO: 207; or a VL of SEQ ID NO: 209 and a VH of SEQ ID NO: 211; or a VL of SEQ ID NO: 213 and a VH of SEQ ID NO: 215; or a VL of SEQ ID NO: 217 and a VH of SEQ ID NO: 219; or a VL of SEQ ID NO: 221 and a VH of SEQ ID NO: 223; or a VL of SEQ ID NO: 225 and a VH of SEQ ID NO: 227; or a VL of SEQ ID NO: 229 and a VH of SEQ ID NO: 231; or a VL of SEQ ID NO: 233 and a VH of SEQ ID NO: 235; or a VL of SEQ ID NO: 237 and a VH of SEQ ID NO: 239; or a VL of SEQ ID NO: 241 and a VH of SEQ ID NO: 243; or a VL of SEQ ID NO: 245 and a VH of SEQ ID NO: 247; or a VL of SEQ ID NO: 249 and a VH of SEQ ID NO: 251; or a VL of SEQ ID NO: 253 and a VH of SEQ ID NO: 255; or a VL of SEQ ID NO: 257 and a VH of SEQ ID NO: 259; or a VL of SEQ ID NO: 261 and a VH of SEQ ID NO: 263; or a VL of SEQ ID NO: 265 and a VH of SEQ ID NO: 267; or a VL of SEQ ID NO: 269 and a VH of SEQ ID NO: 271; or a VL of SEQ ID NO: 273 and a VH of SEQ ID NO: 275; or a VL of SEQ ID NO: 277 and a VH of SEQ ID NO: 279; or a VL of SEQ ID NO: 281 and a VH of SEQ ID NO: 283; or a VL of SEQ ID NO: 285 and a VH of SEQ ID NO: 287; or a VL of SEQ ID NO: 289 and a VH of SEQ ID NO: 291; or a VL of SEQ ID NO: 293 and a VH of SEQ ID NO: 295; or a VL of SEQ ID NO: 297 and a VH of SEQ ID NO: 299; or a VL of SEQ ID NO: 301 and a VH of SEQ ID NO: 303; or a VL of SEQ ID NO: 305 and a VH of SEQ ID NO: 307; or a VL of SEQ ID NO: 309 and a VH of SEQ ID NO: 311; or a VL of SEQ ID NO: 313 and a VH of SEQ ID NO: 315; or a VL of SEQ ID NO: 317 and a VH of SEQ ID NO: 319; or a VL of SEQ ID NO: 321 and a VH of SEQ ID NO: 323; or a VL of SEQ ID NO: 325 and a VH of SEQ ID NO: 327; or a VL of SEQ ID NO: 329 and a VH of SEQ ID NO: 331; or a VL of SEQ ID NO: 333 and a VH of SEQ ID NO: 335; or a VL of SEQ ID NO: 337 and a VH of SEQ ID NO: 339; or a VL of SEQ ID NO: 341 and a VH of SEQ ID NO: 343; or a VL of SEQ ID NO: 345 and a VH of SEQ ID NO: 347; or a VL of SEQ ID NO: 349 and a VH of SEQ ID NO: 351; or a VL of SEQ ID NO: 353 and a VH of SEQ ID NO: 355; or a VL of SEQ ID NO: 357 and a VH of SEQ ID NO: 359; or a VL of SEQ ID NO: 361 and a VH of SEQ ID NO: 363; or a VL of SEQ ID NO: 365 and a VH of SEQ ID NO: 367; or a VL of SEQ ID NO: 369 and a VH of SEQ ID NO: 371; or a VL of SEQ ID NO: 373 and a VH of SEQ ID NO: 375; or a VL of SEQ ID NO: 377 and a VH of SEQ ID NO: 379; or a VL of SEQ ID NO: 381 and a VH of SEQ ID NO: 383; or a VL of SEQ ID NO: 385 and a VH of SEQ ID NO: 387; or a VL of SEQ ID NO: 389 and a VH of SEQ ID NO: 391; or a VL of SEQ ID NO: 393 and a VH of SEQ ID NO: 395; or a VL of SEQ ID NO: 397 and a VH of SEQ ID NO: 399; or a VL of SEQ ID NO: 401 and a VH of SEQ ID NO: 403; or a VL of SEQ ID NO: 405 and a VH of SEQ ID NO: 407.

[0554] For the purposes of the instant application the SEQ ID NOS of each particular antibody are sequential odd numbers. Thus the monoclonal anti-DLL3 antibody, SC16.3, comprises amino acid SEQ ID NOS: 21 and 23 for the light and heavy chain variable regions respectively; SC16.4 comprises SEQ ID NOS: 25 and 27; SC16.5 comprises SEQ ID NOS: 29 and 31, and so on. The corresponding nucleic acid sequence for each antibody amino acid sequence is included in the appended sequence listing and has the SEQ ID NO immediately preceding the corresponding amino acid SEQ ID NO. Thus, for example, the SEQ ID NOS of the VL and VH of the SC16.3 antibody are 21 and 23, respectively, and the SEQ ID NOS of the nucleic acid sequences encoding the VL and VH of the SC16.3 antibody are SEQ ID NOS: 20 and 22, respectively. The CDRs are defined as per Kabat et al. (supra) using a proprietary version of the Abysis database.

### Example 3

### Generation of Chimeric and Humanized Anti-DLL3 Antibodies

[0555] To provide a benchmark for humanized binding domains compatible with the instant invention chimeric anti-DLL3 antibodies were generated using art-recognized techniques as follows. Total RNA was extracted from the hybridomas and amplified as set forth in Example 1. Data regarding V, D and J gene segments of the VH and VL chains of the murine antibodies were obtained from the derived nucleic acid sequences. Primer sets specific to the leader sequence of the VH and VL chain of the antibody were designed using the following restriction sites: AgeI and XhoI for the VH fragments, and XmaI and DraIII for the VL fragments. PCR products were purified with a QIAquick PCR purification kit (Qiagen), followed by digestion with restriction enzymes AgeI and XhoI for the V_{H} fragments and XmaI and DraIII for the VL fragments. The VL and VH digested PCR products were purified and ligated into kappa CL (SEQ ID NO: 5) human light chain constant region expression vector or IgG1 (SEQ ID NO: 6) human heavy chain constant region expression vector, respectively.

[0556] Ligation reactions were performed in a total volume of 10 μL with 200U T4-DNA Ligase (New England Biolabs), 7.5 μL of digested and purified gene-specific PCR product and 25 ng linearized vector DNA. Competent E. coli DH10B bacteria (Life Technologies) were transformed via heat shock at 42° C. with 3 μL ligation product and plated onto plates with ampicillin at a concentration of 100 μg/mL. Following purification and digestion of the amplified ligation products, the V_{H} fragment was cloned into the AgeI-XhoI restriction sites of the pEE6.4HuIgG1 expression vector (Lonza) and the VL fragment was cloned into the XmaI-DraIII restriction sites of the pEE12.4Hu-Kappa expression vector (Lonza).

[0557] Chimeric antibodies were expressed by co-transfection of HEK-293T cells with pEE6.4HuIgG1 and pEE12.4Hu-Kappa expression vectors. Prior to transfection the HEK-293T cells were cultured in 150 mm plates under standard conditions in Dulbecco's Modified Eagle's Medium (DMEM) supplemented with 10% heat inactivated FCS, 100 μg/mL streptomycin and 100 U/mL penicillin G. For transient transfections cells were grown to 80% confluency. 12.5 μg each of pEE6.4HuIgG1 and pEE12.4Hu-Kappa vector DNA were added to 50 μL HEK-293T transfection reagent in 1.5 mL Opti-MEM. The mix was incubated for 30 minutes at room temperature and plated. Supernatants were harvested three to six days after transfection. Culture supernatants containing recombinant chimeric antibodies were cleared from cell debris by centrifugation at 800×g for 10 minutes and stored at 4° C. Recombinant chimeric antibodies were purified by Protein A affinity chromatography.

[0558] The same murine anti-DLL3 antibodies (e.g. SC16.13, SC16.15, SC16.25, SC16.34 and SC16.56) were also used to derive CDR-grafted or humanized binding domains. The murine antibodies were humanized using a proprietary computer-aided CDR-grafting method (Abysis Database, UCL Business) and standard molecular engineering techniques as follows. Human framework regions of the variable regions were designed based on the highest homology between the framework sequences and CDR canonical structures of human germline antibody sequences and the framework sequences and CDRs of the relevant mouse antibodies. For the purpose of the analysis the assignment of amino acids to each of the CDR domains was done in accordance with Kabat et al. Once the variable regions were selected, they were generated from synthetic gene segments (Integrated DNA Technologies). Humanized antibodies were cloned and expressed using the molecular methods described above for chimeric antibodies.

[0559] The genetic composition for the selected human acceptor variable regions are shown in TABLE 5 immediately below for each of the humanized antibodies. The sequences depicted in TABLE 5 correspond to the contiguous variable region sequences set forth in SEQ ID NOS: 389 and 391 (hSC16.13), SEQ ID NOS: 393 and 395 (hSC16.15), SEQ ID NOS: 397 and 399 (hSC16.25), SEQ ID NOS: 401 and 403 (hSC16.34) and SEQ ID NOS: 405 and 407 (hSC16.56). TABLE 5 shows that no framework changes or back mutations were necessary to maintain the favorable binding properties of the selected antibodies.

TABLE 5

| mAb | human VH | human DH | human JH | FW changes | human VK | human JK | FW changes |
|---|---|---|---|---|---|---|---|
| hSC16.13 | IGHV2-5*01 | IGHD1-1 | JH6 | None | IGKV1-39*01 | JK1 | None |
| hSC16.15 | IGHV1-46*01 | IGHD2-2 | JH4 | None | IGKV1-13*02 | JK4 | None |
| hSC16.25 | IGHV2-5*01 | IGHD3-16 | JH6 | None | IGKV6-21*01 | JK2 | None |
| hSC16.34 | IGHV1-3*02 | IGHD3-22 | JH4 | None | IGKV1-27*01 | JK1 | None |
| hSC16.56 | IGHV1-18*01 | IGHD2-21 | JH4 | None | IGKV3-15*01 | JK2 | None |

[0560] Although no residues were altered in the framework regions, in one of the humanized clones (hSC16.13) mutations were introduced into heavy chain CDR2 to address stability concerns. The binding affinity of the antibody with the modified CDR was checked to ensure that it was equivalent to either the corresponding chimeric or murine antibody.

[0561] Following humanization the resulting VL and VH chain amino acid sequences were analyzed to determine their homology with regard to the murine donor and human acceptor light and heavy chain variable regions. The results shown in TABLE 6, immediately below, reveal that the humanized constructs consistently exhibited a higher homology with respect to the human acceptor sequences than with the murine donor sequences. The murine heavy and light chain variable regions show a similar overall percentage homology to a closest match of human germline genes (85%-93%) compared with the homology of the humanized antibodies and the donor hybridoma protein sequences (74%-83%).

TABLE 6

| | Homology to Human | Homology to Murine Parent |
|---|---|---|
| mAb | (CDR acceptor) | (CDR donor) |
| hSC16.13 HC | 93% | 81% |
| hSC16.13 LC | 87% | 77% |
| hSC16.15 HC | 85% | 83% |
| hSC16.15 LC | 85% | 83% |
| hSC16.25 HC | 91% | 83% |
| hSC16.25 LC | 85% | 79% |
| hSC16.34 HC | 87% | 79% |
| hSC16.34 LC | 85% | 81% |
| hSC16.56 HC | 87% | 74% |
| hSC16.56 LC | 87% | 76% |

[0562] As with the chimeric antibodies the humanized VL and VH digested PCR products were purified and ligated into kappa CL (SEQ ID NO: 5) human light chain constant region expression vector or IgG1 (SEQ ID NO: 6) human heavy chain constant region expression vector, respectively. Following expression each of the derived humanized constructs were analyzed using surface plasmon resonance, to determine if the CDR grafting process had appreciably altered their apparent affinity for DLL3 protein. The humanized constructs were compared with chimeric antibodies comprising the murine parent (or donor) heavy and light chain variable domains and a human constant region substantially equivalent to that used in the humanized constructs. The humanized anti-DLL3 antibodies exhibited binding characteristics roughly comparable to those shown by the chimeric parent antibodies (data not shown).

### Example 4

### Generation of Site-Specific Antibodies

[0563] An engineered human IgG1/kappa anti-DLL3 site-specific antibody was constructed comprising a native light chain (LC) constant region and heavy chain (HC) constant region, wherein cysteine 220 (C220) in the upper hinge region of the HC, which forms an interchain disulfide bond with cysteine 214 (C214) in the LC, was substituted with serine (C220S). When assembled the HCs and LCs form an antibody comprising two free cysteines that are suitable for conjugation to a therapeutic agent. Unless otherwise noted, all numbering of constant region residues is in accordance with the EU numbering scheme as set forth in Kabat et al.

[0564] The engineered antibodies were generated as follows. An expression vector encoding the full-length humanized anti-DLL3 antibody hSC16.56 was used as a template for PCR amplification and site directed mutagenesis. Site directed mutagenesis was performed using the Quick-Change® system (Agilent Technologies) according to the manufacturer's instructions.

[0565] The vector encoding the mutant C220S heavy chain of hSC16.56 was co-transfected with the native full-length kappa light chain in CHO—S cells and expressed using a mammalian transient expression system. The engineered anti-DLL3 site-specific antibody containing the C220S mutant was termed hSC16.56ss1. Once expressed the engineered anti-DLL3 antibodies were characterized by SDS-PAGE to confirm that the correct mutants had been generated. SDS-PAGE was conducted on a pre-cast 10% Tris-Glycine mini gel from life technologies in the presence and absence of a reducing agent such as DTT (dithiothreitol). Following electrophoresis, the gels were stained with a colloidal Coomassie solution. Under reducing conditions, two bands corresponding to the free LCs and free HCs, were observed (data not shown). This pattern is typical of IgG molecules in reducing conditions. Under non-reducing conditions, the band patterns were different from native IgG molecules, indicative of the absence of a disulfide bond between the HC and LC. A band around 98 kD corresponding to the HC—HC dimer was observed. In addition, a faint band corresponding to the free LC and a predominant band around 48 kD that corresponded to a LC-LC dimer was observed. The formation of some amount of LC-LC species is expected due to the free cysteines on the C-terminus of each LC.

### Example 5

### Domain and Epitope Mapping of Anti-DLL3 Antibodies

[0566] In order to characterize and position the epitopes that the disclosed anti-DLL3 antibodies bind to, domain-level epitope mapping was performed using a modification of the protocol described by Cochran et al., 2004 (supra). Individual domains of DLL3 comprising specific amino acid sequences were expressed on the surface of yeast, and binding by each anti-DLL3 antibody was determined through flow cytometry.

[0567] Yeast display plasmid constructs were created for the expression of the following constructs: DLL3 extracellular domain (amino acids 27-466); DLL1-DLL3 chimera, which consists of the N-terminal region and DSL domain of DLL1 (amino acids 22-225) fused to EGF-like domains 1 through 6 of DLL3 (amino acids 220-466); DLL3-DLL1 chimera, which consists of the N-terminal region and DSL domain of DLL3 (amino acids 27-214) fused to EGF-like domains 1 through 8 of DLL1 (amino acids 222-518); EGF1 (amino acids 215-249); EGF2 (amino acids 274-310); EGF1 and EGF2 (amino acids 215-310); EGF3 (amino acids 312-351); EGF4 (amino acids 353-389); EGF5 (amino acids 391-427); and EGF6 (amino acids 429-465). For domain information see generally UniProtKB/Swiss-Prot database entry Q9NYJ7. Note that the amino acid numbering references an unprocessed DLL3 protein with a leader sequence included in the sequence set forth in SEQ ID NO. 1.) For analysis of the N-terminal region or the EGF domains as a whole, chimeras with the family member DLL1 (DLL1-DLL3 and DLL3-DLL1) were used as opposed to fragments to minimize potential problems with protein folding. Domain-mapped antibodies had previously been shown not to cross-react with DLL1 indicating that any binding to these constructs was occurring through association with the DLL3 portion of the construct. These plasmids were transformed into yeast, which were then grown and induced as described in Cochran et al.

[0568] To test for binding to a particular construct, 200,000 induced yeast cells expressing the desired construct were washed twice in PBS+1 mg/mL BSA (PBSA), and incubated in 50 μL of PBSA with biotinylated anti-HA clone 3F10 (Roche Diagnostics) at 0.1 μg/mL and either 50 nM purified antibody or 1:2 dilution of unpurified supernatant from hybridomas cultured for 7 days. Cells were incubated for 90 minutes on ice, followed by two washes in PBSA. Cells were then incubated in 50 μL PBSA with the appropriate secondary antibodies: for murine antibodies, Alexa 488 conjugated streptavidin, and Alexa 647 conjugated goat anti mouse (Life Technologies) were added at 1 μg/mL each; and for humanized or chimeric antibodies, Alexa 647 conjugated streptavidin (Life Technologies) and R-phycoerythrin conjugated goat anti human (Jackson Immunoresearch) were added at 1 μg/mL each. After a twenty minute incubation on ice, cells were washed twice with PBSA and analyzed on a FACS Canto II. Antibodies that bound to DLL3-DLL1 chimera were designated as binding to the N-terminal region+DSL. Antibodies that bound specifically to an epitope present on a particular EGF-like domain were designated as binding to its respective domain (FIG. 2.)

[0569] In order to classify an epitope as conformational (e.g., discontinuous) or linear, yeast displaying the DLL3 ECD was heat treated for 30 minutes at 80° C. to denature the DLL3 ECD, and then washed twice in ice-cold PBSA. The ability of anti-DLL3 antibodies to bind the denatured yeast was tested by FACS using the same staining protocol as described above. Antibodies that bound to both the denatured and native yeast were classified as binding to a linear epitope, whereas antibodies that bound native yeast but not denatured yeast were classified as conformationally specific.

[0570] A schematic summary of the domain-level epitope mapping data of the antibodies tested is presented in FIG. 2, with antibodies binding a linear epitope underlined and, where determined, the corresponding bin noted in parenthesis. A review of FIG. 2 shows that the majority of anti-DLL3 antibodies tended to map to epitopes found either in the N-terminal/DSL region of DLL3 or EGF2. FIG. 2 presents similar data in a tabular form on bin determination and domain mapping for various anti-DLL3 antibodies.

[0571] Fine epitope mapping was further performed on selected antibodies using one of two methods. The first method employed the Ph.D.-12 phage display peptide library kit (New England Biolabs) which was used in accordance with the manufacturer's instructions. The antibody for epitope mapping was coated overnight at 50 μg/mL in 3 mL 0.1 M sodium bicarbonate solution, pH 8, onto a Nunc MaxiSorp tube (Nunc). The tube was blocked with 3% BSA solution in bicarbonate solution. Then, 101 input phage in PBS+0.1% Tween-20 was allowed to bind, followed by ten consecutive washes with 0.1% Tween-20 to wash away non-binding phage. Remaining phage were eluted with 1 mL 0.2 M glycine for 10 minutes at room temperature with gentle agitation, followed by neutralization with 150 μL 1M Tris-HCl pH 9. Eluted phage were amplified and panned again with 10¹¹ input phage, using 0.5% Tween-20 during the wash steps to increase selection stringency. DNA from 24 plaques of the eluted phage from the second round was isolated using the Qiaprep M13 Spin kit (Qiagen) and sequenced. Binding of clonal phage was confirmed using an ELISA assay, where the mapped antibody or a control antibody was coated onto an ELISA plate, blocked, and exposed to each phage clone. Phage binding was detected using horseradish peroxidase conjugated anti-M13 antibody (GE Healthcare), and the 1-Step Turbo TMB ELISA solution (Pierce). Phage peptide sequences from specifically binding phage were aligned using Vector NTI (Life Technologies) against the antigen ECD peptide sequence to determine the epitope of binding.

[0572] Alternatively, a yeast display method (Chao et al., 2007, PMID: 17406305) was used to map the epitopes of selected antibodies. Libraries of DLL3 ECD mutants were generated with error prone PCR using nucleotide analogues 8-oxo-2′deoxyguanosine-5′-triphosphate and 2′-deoxy-p-nucleoside-5′triphosphate (TriLink Bio) for a target mutagenesis rate of one amino acid mutation per clone. These were transformed into a yeast display format. Using the technique described above for domain-level mapping, the library was stained for HA and antibody binding at 50 nM. Using a FACS Aria (BD), clones that exhibited a loss of binding compared to wild type DLL3 ECD were sorted. These clones were re-grown, and subjected to another round of FACS sorting for loss of binding to the target antibody. Using the Zymoprep Yeast Plasmid Miniprep kit (Zymo Research), individual ECD clones were isolated and sequenced. Where necessary, mutations were reformatted as single-mutant ECD clones using the Quikchange site directed mutagenesis kit (Agilent).

[0573] Individual ECD clones were next screened to determine whether loss of binding was due to a mutation in the epitope, or a mutation that caused misfolding. Mutations that involved cysteine, proline, and stop codons were automatically discarded due to the high likelihood of a misfolding mutation. Remaining ECD clones were then screened for binding to a non-competing, conformationally specific antibody. ECD clones that lost binding to non-competing, conformationally specific antibodies were concluded to contain misfolding mutations, whereas ECD clones that retained equivalent binding to wild type DLL3 ECD were concluded to be properly folded. Mutations in the ECD clones in the latter group were concluded to be in the epitope.

[0574] A summary of selected antibodies with their derived epitopes comprising amino acid residues that are involved in antibody binding are listed in TABLE 7 below. Antibodies SC16.34 and SC16.56 interact with common amino acid residues which is consistent with the binning information and domain mapping results shown in FIG. 2. Moreover, SC16.23 was found to interact with a distinct contiguous epitope and was found not to bin with SC16.34 or SC16.56. Note that for the purposes of the appended sequence listing SEQ ID NO: 4 comprises a placeholder amino acid at position 204.

TABLE 7

| Antibody Clone | Epitope | SEQ ID NO: |
|---|---|---|
| SC16.23 | Q93, P94, G95, A96, P97 | 3 |
| SC16.34 | G203, R205, P206 | 4 |
| SC16.56 | G203, R205, P206 | 4 |

### Example 6

### Conjugation of Anti-DLL3 Antibodies to Pyrrolobenzodiazepines (PBDs)

[0575] A humanized anti-DLL3 antibody (hSC16.56) and a humanized site-specific anti-DLL3 antibody (hSC16.56ss1) were conjugated to a pyrrolobenzodiazepine (DL1, PBD1) via a terminal maleimido moiety with a free sulfhydryl group to create the ADCs termed hSC16.56PBD1 and hSC16.56ss1PBD1. hSC16.56PBD1 (i.e., SC16LD6.5) and hSC16.56ss1PBD1 were made under GMP conditions as it was intended for use in clinical trials. The humanized DLL3 (hSC16.56) antibody drug conjugates (ADCs) were prepared in two distinct stages; a reduction step and a conjugation step to conjugate PBD1 to hSC16.56. The ADCs were then processed through Cation Exchange (CEX) Chromatography, followed by diafiltration and formulation steps to produce the drug substance. The process is described in detail below.

[0576] The antibodies were adjusted to pH 7.5 with the addition of 200 mM Tris Base, 32 mM EDTA pH 8.5. Cysteine bonds of the pH adjusted DLL3 antibodies were then partially reduced with a pre-determined molar addition of mol tris(2-carboxyethyl)-phosphine (TCEP) per mol antibody for 90 min. at 20° C. The resulting partially reduced preparations were then conjugated to PBD1 (as set forth above) via a maleimide linker for a minimum of 30 minutes at 20° C. The reaction was then quenched with the addition of excess N-acetyl cysteine (NAC) compared to linker-drug using a 10 mM stock solution prepared in water. After a minimum quench time of 20 minutes the pH was adjusted to 5.5 with the addition of 0.5 M acetic acid. Preparations of the ADCs were then processed through Cation Exchange (CEX) Chromatography in a bind and elute mode with a step elution to remove aggregates formed during the conjugation step. CEX purified ADCs were then buffer exchanged into diafiltration buffer by diafiltration using a 30 kDa membrane. The dialfiltered anti-DLL3 ADC was then formulated with sucrose and polysorbate-20 to the target final concentration to produce drug substance.

[0577] The site specific humanized anti-DLL3 (hSC16.56ss1) ADCs were conjugated using a modified partial reduction process. In this respect the desired product is an ADC that is maximally conjugated on the unpaired cysteine (C214) on each LC constant region and that minimizes ADCs having a drug to antibody ratio (DAR) which is greater than 2 (DAR>2) while maximizing ADCs having a DAR of 2 (DAR=2). In order to further improve the specificity of the conjugation, the antibodies were selectively reduced using a process comprising a stabilizing agent (e.g. L-arginine) and a mild reducing agent (e.g. glutathione) prior to conjugation with the linker-drug. The ADCs were then processed through preparative Hydrophobic Interaction Chromatography (HIC), followed by a diafiltration and formulation step to produce the drug substance. The process is described in detail below.

[0578] The site-specific antibody constructs were partially reduced in a buffer containing 1M L-arginine/5 mM EDTA with a pre-determined concentration of reduced glutathione (GSH), pH 8.0 for a minimum of two hours at room temperature. All preparations were then buffer exchanged into a 20 mM Tris/3.2 mM EDTA, pH 7.0 buffer using a 30 kDa membrane to remove the reducing buffer. The resulting partially reduced preparations were then conjugated to PBD1 (as set forth above) via a maleimide linker for a minimum of 30 mins. at 20° C. The reaction was then quenched with the addition of excess NAC compared to linker-drug using a 10 mM stock solution prepared in water. After a minimum quench time of 20 minutes the pH was adjusted to 6.0 with the addition of 0.5 M acetic acid. The pH adjusted ADCs were then processed through preparative Hydropobic Interaction Chromatography (HIC) (Butyl Sepharose FF) in a bind and elute mode with a step elution to further purify the DAR 2 species. The purified ADCs were then buffer exchanged into diafiltration buffer by diafiltration using a 30 kDa membrane. The dialfiltered anti-DLL3 ADC was then formulated with sucrose and polysorbate-20 to the target final concentration to produce the site-specific drug substance.

### Example 7

### Cloning and Expression of Recombinant ASCL1 Fusion Proteins and Engineering of Cell Lines Overexpressing ASCL1 Protein

[0579] DNA Fragments Encoding Human ASCL1 and ASCL2 Protein.

[0580] To generate all cellular materials required in the present invention pertaining to the human ASCL1 (hASCL1) protein (GenBank accession NP_004307), a synthetic DNA fragment that encoded the open reading frame of the ASCL1 mRNA (GenBank accession NM_004316, nts 572-1282) was subcloned into a CMV driven expression vector in-frame and downstream of an IgK signal peptide sequence and upstream of either a 9-Histidine tag or a human IgG2 Fc cDNA, using standard molecular techniques. These CMV-driven expression vectors permit high level transient expression in HEK-293T and/or CHO—S cells. Suspension or adherent cultures of HEK-293T cells, or suspension CHO—S cells were transfected with these expression constructs, using polyethylenimine polymer as the transfecting reagent. Three to five days after transfection, the recombinant His-tagged or Fc-tagged proteins were purified from clarified cell-supernatants using an AKTA explorer and either Nickel-EDTA (Qiagen) or MabSelect SuRe™ Protein A (GE Healthcare Life Sciences) columns, respectively. Recombinant ASCL2 protein was created similarly, using a synthetic DNA fragment that encoded the open reading frame of the ASCL2 mRNA (GenBank accession NM_005170, nts 621-1202).

[0581] To create a lentiviral vector plasmid encoding the hASCL1 protein, the synthetic DNA encoding the hASCL1 open reading frame was subcloned in-frame into the multiple cloning site (MCS) of a lentiviral expression vector pCDH-EF1-MCS-T2A-GFP (System Biosciences, Mountain View Calif.), which had been previously modified to introduce nucleotide sequences encoding a DDDK epitope tag upstream of the multiple cloning site (MCS). The T2A sequence downstream of the MCS promotes ribosomal skipping of a peptide bond condensation, resulting in expression of two independent proteins: high level expression of DDDK-tagged proteins encoded upstream of the T2A peptide, with co-expression of the GFP marker protein encoded downstream of the T2A peptide. This cloning step yielded the lentiviral vector plasmid pLMEGPA-hASCL1-NFlag.

[0582] Cell Line Engineering

[0583] Engineered cell lines overexpressing hASCL1 protein were constructed using the pLMEGPA-hASCL1-NFlag lentiviral vector, described above, to transduce HEK-293T cell lines using standard lentiviral transduction techniques well known to those skilled in the art. hASCL1-positive cells were selected using fluorescent activated cell sorting (FACS) of high-expressing HEK-293T subclones (e.g., cells that were strongly positive for GFP, which serves as a surrogate for high intracellular expression of ASCL1 in cells).

### Example 8

### Generation of Murine Anti-ASCL1 Antibodies

[0584] Anti-ASCL1 murine antibodies were produced in two immunization campaigns as follows. Mice from the strains Balb/c, CD-1, and FVB were inoculated with 10 μg hASCL1-Fc emulsified with an equal volume of TiterMax® adjuvant. Following the initial inoculation the mice were injected twice weekly for 4 weeks with 10 μg hASCL1 protein emulsified with an equal volume of alum adjuvant plus CpG.

[0585] Mice were sacrificed and draining lymph nodes (popliteal, inguinal, and medial iliac) were dissected and used as a source for antibody producing cells. A single-cell suspension of B cells was produced and (122.5×10⁶ cells) were fused with non-secreting SP2/0-Ag14 myeloma cells (ATCC # CRL-1581) at a ratio of 1:1 by electro cell fusion using a model BTX Hybrimmune System (BTX Harvard Apparatus). Cells were re-suspended in hybridoma selection medium consisting of DMEM medium supplemented with azaserine, 15% fetal clone I serum (Thermo #SH30080-03), 10% BM condimed (Roche #10663573001), 1 mM nonessential amino acids (Corning #25-025-CI) 1 mM HEPES Corning #25-060-CI), 100 IU penicillin-streptomycin (Corning #30-002-CI), 100 IU L-glutamine (Corning #25-005-CI) and were cultured in three T225 flasks containing 100 mL selection medium. The flasks were placed in a humidified 37° C. incubator containing 7% CO2 and 95% air for 6 days.

[0586] On day 6 after the fusion the hybridoma library cells were frozen-down temporarily. The cells were thawed in hybridoma selection medium and allowed to rest in a humidified 37° C. incubator for 1 day. The cells were sorted from the flask and plated at one cell per well (using a BD FACSAria I cell sorter) in 90 μL of supplemented hybridoma selection medium (as described above) into 12 Falcon 384-well plates. Remaining unused hybridoma library cells were frozen in liquid nitrogen for future library testing and screening.

[0587] The hybridomas were cultured for 10 days and the supernatants from 12×384 clones were screened by ELISA for antibodies specific to hASCL1 yet not cross-reactive with the family member hASCL2, using the following method. Plates were coated with purified hASCL1-Fc or hASCL2-Fc at 0.5 μg/mL in PBS buffer and incubated at 4° C. overnight. Plates were then washed with PBST and blocked with PBS with 5% FBS for 30 min. at 37° C. The blocking solution was removed and 15 μl PBST was added to the wells. 25 μl of hybridoma supernatant was added and incubated overnight at 4° C. After washing with PBST, 30 μL/well HRP-labeled goat anti-mouse IgG diluted 1:10,000 in PBSA was added for 30 min. at room temperature. The plates were washed and developed by the addition of 25 μL/well of the TMB substrate solution (Thermo Scientific) for approximately 5 min. at room temperature. An equal volume of 0.2 M H₂SO₄ was added to stop substrate development. The samples were then analyzed by spectrophotometer at OD 450. Supernatants that had an OD 450 greater than 3 times the background on the ASCL1 plate were considered to be positively reactive, while any clones that also had an OD 450 greater than 3 times the background on the ASCL2 plate were rejected as cross-reactive. Screening of these 12×384 clones from the hASCL1-Fc immunization campaigns yielded numerous antibodies that bound specifically to hASCL1, but not the related family member ASCL2, eighty of which were carried forward for further characterization.

[0588] A second immunization campaign was conducted similar to the first with the following modifications: 1) 299×10⁶ cells) were fused with non-secreting SP2/0-Ag14 myeloma cells (ATCC # CRL-1581) at a ratio of 1:1 by electro cell fusion using a model BTX Hybrimmune System (BTX Harvard Apparatus). On day 6, after the fusion, the hybridoma cells were not frozen and were sorted on that day. After the 10 day culture, 6×384 clones were screened by ELISA selecting for antibodies positive to hASCL1-GST (glutathione S-transferase) and counter screened against an irrelevant protein tagged with GST. As part of this, ALK phosphatase-labeled goat anti-mouse IgG diluted 1:5000 in PBSA was used instead of HRP-labeled goat anti-mouse IgG diluted 1:10:000. ELISA samples were analyzed at OD405 instead of OD450.

### Example 9

### Sequencing of Anti-ASCL1 Antibodies

[0589] Based on the foregoing, a number of exemplary distinct monoclonal antibodies that bind immobilized human ASCL1 or h293-hASCL1 cells with apparently high affinity were selected for sequencing and further analysis. Sequence analysis of the light chain variable regions and heavy chain variable regions from selected monoclonal antibodies generated in Example 8 confirmed that many had novel complementarity determining regions and often displayed novel VDJ arrangements.

[0590] The anti-ASCL1 mouse antibodies that were generated in Example 2 were sequenced as described below. Total RNA was purified from selected hybridoma cells using the RNeasy Miniprep Kit (Qiagen) according to the manufacturer's instructions. Between 10⁴ and 10⁵ cells were used per sample. Isolated RNA samples were stored at −80° C. until used.

[0591] The variable region of the Ig heavy chain of each hybridoma was amplified using two 5′ primer mixes comprising eighty-six mouse specific leader sequence primers designed to target the complete mouse VH repertoire in combination with a 3′ mouse Cγ primer specific for all mouse Ig isotypes. Similarly, two primer mixes containing sixty-four 5′ Vκ leader sequences designed to amplify each of the Vκ mouse families was used in combination with a single reverse primer specific to the mouse kappa constant region in order to amplify and sequence the kappa light chain. The VH and VL transcripts were amplified from 100 ng total RNA using the Qiagen One Step RT-PCR kit as follows. A total of four RT-PCR reactions were run for each hybridoma, two for the Vκ light chain and two for the VH heavy chain. PCR reaction mixtures included 1.5 μL of RNA, 0.4 μL of 100 μM of either heavy chain or kappa light chain primers (custom synthesized by Integrated DNA Technologies), 5 μL of 5×RT-PCR buffer, 1 μL dNTPs, and 0.6 μL of enzyme mix containing reverse transcriptase and DNA polymerase. The thermal cycler program was RT step 50° C. for 60 min., 95° C. for 15 min. followed by 35 cycles of (94.5° C. for 30 seconds, 57° C. for 30 seconds, 72° C. for 1 min.). There was then a final incubation at 72° C. for 10 min.

[0592] The extracted PCR products were sequenced using the same specific variable region primers as described above for the amplification of the variable regions. PCR products were sent to an external sequencing vendor (MCLAB) for PCR purification and sequencing services. Nucleotide sequences were analyzed using the IMGT sequence analysis tool available online at the website identified as http://www.imgt.org/IMGTmedical/sequence_analysis.html to identify germline V, D and J gene members with the highest sequence homology. The derived sequences were compared to known germline DNA sequences of the Ig V- and J-regions by alignment of VH and VL genes to the mouse germline database using a proprietary antibody sequence database.

[0593] FIG. 3A depicts the contiguous amino acid sequences of novel murine light chain variable regions from anti-ASCL1 antibodies while FIG. 3B depicts the contiguous amino acid sequences of novel murine heavy chain variable regions from the same anti-ASCL1 antibodies. Taken together murine light and heavy chain variable region amino acid sequences are provided in SEQ ID NOS: 521-573 odd numbers.

[0594] More particularly FIGS. 3A and 3B provide the annotated sequences of murine anti-ASCL1 antibodies comprising: (1) a light chain variable region (VL) of SEQ ID NO: 521 and a heavy chain variable region (VH) of SEQ ID NO: 523; or (2) a VL of SEQ ID NO: 525 and a VH of SEQ ID NO: 527; or (3) a VL of SEQ ID NO: 529 and a VH of SEQ ID NO: 531; or (4) a VL of SEQ ID NO: 533 and a VH of SEQ ID NO: 535; or (5) a VL of SEQ ID NO: 537 and a VH of SEQ ID NO: 539; or (6) a VL of SEQ ID NO: 541 and a VH of SEQ ID NO: 543; or (7) a VL of SEQ ID NO: 545 and a VH of SEQ ID NO: 547; or (8) a VL of SEQ ID NO: 549 and a VH of SEQ ID NO: 551; or (9) a VL of SEQ ID NO: 553 and a VH of SEQ ID NO: 555; or (10) a VL of SEQ ID NO: 557 and a VH of SEQ ID NO: 559; or (11) a VL of SEQ ID NO: 561 and a VH of SEQ ID NO: 563; or (12) a VL of SEQ ID NO: 565 and a VH of SEQ ID NO: 567; or (13) a VL of SEQ ID NO: 569 and a VH of SEQ ID NO: 571; or (14) a VL of SEQ ID NO: 521 and a VH of SEQ ID NO: 573.

[0595] A summary of the disclosed antibodies (or clones producing them), with their respective designation (e.g., SC72.2, SC72.28, etc.) and variable region nucleic acid or amino acid SEQ ID NOS (see FIGS. 3A-3C) are shown immediately below in Table 8.

TABLE 8

| | VL | VH |
|---|---|---|
| | SEQ ID NO: | SEQ ID NO: |
| Clone | NA/AA | NA/AA |
| SC72.2 | 520/521 | 522/523 |
| SC72.28 | 524/525 | 526/527 |
| SC72.52 | 528/529 | 530/531 |
| SC72.63 | 532/533 | 534/535 |
| SC72.76 | 536/537 | 538/539 |
| SC72.91 | 540/541 | 542/543 |
| SC72.94 | 544/545 | 546/547 |
| SC72.96 | 548/549 | 550/551 |
| SC72.132 | 552/553 | 554/555 |
| SC72.165 | 556/557 | 558/559 |
| SC72.181 | 560/561 | 562/563 |
| SC72.201 | 564/565 | 566/567 |
| SC72.216 | 568/569 | 570/571 |
| SC72.93 | 520/521 | 572/573 |

[0596] The VL and VH amino acid sequences in FIGS. 3A and 3B are annotated to identify the framework regions (i.e. FR1-FR4) and the complementarity determining regions (i.e., CDR-L1-CDR-L3 in FIG. 3A or CDR-H1-CDR-H3 in FIG. 3B), defined as per Kabat et al. The variable region sequences were analyzed using a proprietary version of the Abysis database to provide the CDR and FR designations. Though the CDRs are defined as per Kabat et al., those skilled in the art will appreciate that the CDR and FR designations can also be defined according to Chothia, McCallum or any other accepted nomenclature system. In addition, FIG. 3C provides the nucleic acid sequences (SEQ ID NOS: 520-572, even numbers) encoding the amino acid sequences set forth in FIGS. 3A and 3B.

[0597] As seen in FIGS. 3A and 3B and Table 8, the SEQ ID NOS. of the heavy and light chain variable region amino acid sequences for each particular murine antibody are generally sequential odd numbers. Thus, the monoclonal anti-ASCL1 antibody SC72.2 comprises amino acid SEQ ID NOS: 521 and 523 for the light and heavy chain variable regions respectively; SC72.28 comprises SEQ ID NOS: 525 and 527; SC72.52 comprises SEQ ID NOS: 529 and 531, and so on. The single exception to the sequential numbering scheme is SC72.93 which comprises the same light chain variable region amino acid sequence as clone SC72.2 (SEQ ID NO: 521) along with a unique heavy chain variable region amino acid sequence (SEQ ID NO: 573). In any event the corresponding nucleic acid sequence encoding the murine antibody amino acid sequence (set forth in FIG. 3C) has a SEQ ID NO. immediately preceding the corresponding amino acid SEQ ID NO. Thus, for example, the SEQ ID NOS. of the nucleic acid sequences of the VL and VH of the SC72.2 antibody are SEQ ID NOS: 520 and 522, respectively.

### Example 10

### DLL3 Expression in Tumors that have Undergone Targeted Therapy

[0598] DLL3 is a target of the transcription factor ASCL1, and is expressed in SCLC and other neuroendocrine tumors. Publicly available data sets were analyzed for DLL3 expression and the resulting data is depicted in FIGS. 4-10. The results of this analysis suggest that DLL3 expression is upregulated upon transformation of various adenocarcinomas to a neuroendocrine phenotype, particularly those tumors that have previously undergone a targeted therapy.

[0599] FIG. 4 shows an analysis of data described in Tzelepi, 2012 (PMID: 22156612). This analysis revealed that DLL3 expression is limited to patient derived xenograft (PDX) samples of CRPC that lost AR expression (CR/AR-), and express neuroendocrine markers like CHGA and SYP, in contrast to normal prostate samples or CRPC that maintains AR expression (CR/AR+).

[0600] FIG. 5 shows analysis of data described in Varambally, 2005 (database GSE3325; PMID: 16286247) where the analysis revealed DLL3 expression in 2 of 4 metastatic prostate cancer samples, with no DLL3 expression in benign prostate samples or clinically localized prostate adenocarcinoma.

[0601] FIG. 6 shows analysis of data described in Lin, 2013 (PMID: 24356420) wherein the analysis revealed DLL3 expression in neuroendocrine transformed CRPC (NEPC) and not in prostate adenocarcinoma (PCa).

[0602] FIG. 7 shows analysis of data described in Akamatsu, 2015 (PMID: 26235627) wherein the data revealed that LTL331, which is a biopsy from a hormone naïve prostate adenocarcinoma that is AR+ and PSA+, is DLL3 negative. A subsequent biopsy from the patient after relapse and development of CRPC (relapsed) shows high expression of DLL3. LTL331 was established as a PDX in a mouse host that was then castrated through treatment with bicalutamide. Timepoints (days post castration) show no DLL3 expression until a CRPC develops in the castrated mouse (LTL331R). Neuroendocrine markers including ASCL1, ENO2, NCAM1 and SYP are also expressed exclusively in LTL331R and the patient biopsy upon relapse. CHGA expression turns on at day 84, just before CRPC develops.

[0603] FIG. 8 shows further analysis of data described in Akamatsu, 2015 (PMID: 26235627) wherein the analysis revealed that the expression of certain markers, including PEG10, changed before relapse in this patient. More specifically PEG10 expression is elevated 3 weeks post castration and continues to rise during CRPC development. The analysis also reveals a gradual reduction and/or loss of SPDEF, PTGER4 and ERG expression starting early during mouse host castration, suggesting that PEG10, SPDEF, PTGER4 and ERG may be useful as markers of adenocarcinomas at risk for transitioning to a neuroendocrine phenotype.

[0604] FIG. 9 shows analysis of data described in Zhang, 2015 (PMID: 26071481) where the analysis revealed that 20 prostate adenocarcinoma (PR-Ad) PDX have low or no DLL3 expression, while 4 neuroendocrine transformed CRPC PDX express high levels of DLL3.

[0605] FIG. 10 shows analysis of data described in Niederst, 2015 (PMID 25758528) wherein the analysis revealed a lack of DLL3 expression in an EGFR mutant lung adenocarcinoma biopsy that is sensitive to an EGFR TKI (sensitive), as well as a lack of DLL3 expression in 6 biopsy samples from lung adenocarcinoma patients that harbor a T790M resistance mutation (resistant—T790M). In contrast, elevated DLL3 expression is seen in lung adenocarcinoma that has undergone physiological transformation and become resistant to EGFR TKIs, either due to epithelial to mesenchymal transition (EMT) (resistant—EMT) or due to SCLC transformation (resistant—SCLC; 2 biopsies from same patient). Collectively this analysis showed elevated DLL3 RNA expression in CRPC and lung adenocarcinoma that have transformed to a neuroendocrine phenotype.

[0606] In the aggregate these data show that DLL3 is not extensively expressed in either prostate adenocarcinoma or lung adenocarcinoma with EGFR activating mutations. However, following targeted therapy, androgen deprivation therapy for prostate adenocarcinoma, or treatment with a tyrosine kinase inhibitor for EGFR mutated lung adenocarcinoma, treatment resistant tumors arise that apparently have a neuroendocrine component. The treatment resistant tumors now express DLL3.

### Example 11

### Anti-DLL3 IHC Demonstrates that DLL3 is Expressed on CRPC Tumors

[0607] To confirm that DLL3 protein expression is seen in CRPC, 6 bone metastasis biopsy samples from CRPC patients were stained by immunohistochemistry with an anti-DLL3 antibody.

[0608] IHC was performed essentially as follows. Planar sections of formalin fixed and paraffin embedded (FFPE) tissues were cut and mounted on glass microscope slides. After xylene de-paraffinization sections were pre-treated with Antigen Retrieval Solution (Dako) for 20 mins. at 99° C., cooled to room temperature for 20 minutes and then treated with 0.3% hydrogen peroxide in PBS followed by Avidin/Biotin Blocking Solution (Vector Laboratories). FFPE sections were then blocked with 10% horse or donkey serum in 3% BSA in PBS buffer for 30 minutes at room temperature. Anti-DLL3 antibody (clone SC16.65 was diluted to 10 μg/ml in 3% BSA/PBS and Chromagranin A (clone SP12, Spring Biosciences) antibody was diluted at 1:200 in BSA/PBS. Primary antibodies were applied to sections for a 60 minute incubation at room temperature. The FFPE sections were incubated with biotin-conjugated horse anti-mouse (Vector Labs) or donkey anti-rabbit (Jackson Immunoresearch) secondary antibody diluted to 2.5 μg/ml in 3% BSA/PBS, for 30 mins. at room temperature followed by incubation in streptavidin-HRP (ABC Elite Kit; Vector Laboratories). For DLL3 staining an amplification step was used. FFPE sections were incubated in biotinyl tyramide for 5 minutes at room temperature followed by incubation in streptavidin HRP (Perkin Elmer) for 30 minutes. Chromogenic detection was developed with 3,3′-diaminobenzidine (Thermo Scientific) for 5 mins. at room temperature and tissues were counterstained with Meyer's hematoxylin (IHC World), washed with alcohol and immersed in xylene. Sections were then viewed by brightfield microscopy and DLL3 and CHGA expression was scored.

[0609] Immunohistochemistry found DLL3 protein expression in 1/6 CRPC bone metastasis biopsy sample further indicating that the disclosed DLL3 ADCs may be used to treat CRPC.

### Example 12

### IHC Demonstrates that DLL3 is Expressed on Selected Bladder Tumors

[0610] IHC Data was generated as set forth herein using a commercially available tumor array to determine if certain markers are indicative DLL3 positive bladder tumors.

[0611] In this regard, FIG. 11 is a tabular summary of DLL3 and CHGA expression following immunohistochemical staining of a common cancer array (Imgenex; IMH-327) with multiple types of tumors. Further analysis of the data revealed that 3 of 9 prostate adenocarcinomas showed some expression of CHGA, and one of those CHGA positive tumors had ≤1% of tumor cells positive for DLL3 expression.

[0612] The results of this analysis suggested that tumor heterogeneity might allow for a rare neuroendocrine transformed cell to grow out after treatment with androgen deprivation therapy kills the majority of the AR dependent tumor cells. In addition to prostate, rare DLL3 positive cells were seen in 3/9 bladder transitional cell carcinoma (TCC) biopsy samples, and one bladder mucinous adenocarcinoma, although these were CHGA negative (FIG. 11).

[0613] Small cell neuroendocrine tumors do arise in the bladder and are very aggressive, but perhaps due to the lack of targeted therapies, bladder TCC treated with standard chemotherapy has not been reported to transform into small cell neuroendocrine tumors. Concurrent adenocarcinoma with a neuroendocrine carcinoma has been described (Jiang Y 2014; PMID: 25582251), and therefore, based upon the analysis presented herein, bladder carcinoma may also be identified as at risk for transitioning to a neuroendocrine phenotype due to tumor heterogeneity.

### Example 13

### Expression of ASCL1 mRNA in PDX Tumors

[0614] To characterize the cellular heterogeneity of solid tumors as they exist in cancer patients and to elucidate molecular subtypes within given tumor indications, a PDX tumor bank was developed and maintained using art recognized techniques. The PDX tumor bank, comprising a large number of discrete tumor cell lines, was propagated in immunocompromised mice through multiple passages of tumor cells originally obtained from cancer patients afflicted by a variety of solid tumor malignancies. Low passage PDX tumors are representative of tumors in their native environments, providing clinically relevant insight into underlying mechanisms driving tumor growth and resistance to current therapies. Selected PDX cell lines of pancreatic, colorectal and lung tumors were then interrogated as set forth immediately below.

[0615] In order to perform ASCL1 microarray analysis, PDX tumors were resected from mice after they reached 800-2,000 mm³. Resected PDX tumors were dissociated into single cell suspensions using art-recognized enzymatic digestion techniques (see, for example, U.S.P.N. 2007/0292414). Dissociated bulk tumor cells were incubated with 4′,6-diamidino-2-phenylindole (DAPI) to detect dead cells, anti-mouse CD45 and H-2K^{d} antibodies to identify mouse cells and anti-human EPCAM antibody to identify human cells. RNA was extracted from tumor cells by lysing the cells in RLTplus RNA lysis buffer (Qiagen) supplemented with 1% 2-mercaptoethanol, freezing the lysates at −80° C. and then thawing the lysates for RNA extraction using an RNeasy isolation kit (Qiagen). RNA was quantified using a Nanodrop spectrophotometer (Thermo Scientific) and/or a Bioanalyzer 2100 (Agilent Technologies). Normal tissue RNA was purchased from various sources (Life Technology, Agilent, ScienCell, BioChain, and Clontech). The resulting total RNA preparations were assessed by microarray analysis (Agilent Technologies).

[0616] Microarray experiments on various PDX lines (and engineered 293 cell controls) were conducted and data was analyzed as follows: 1-2 μg of whole tumor total RNA was extracted, substantially as described above, from PDX lines. The RNA samples were analyzed using the Agilent SurePrint GE Human 8×60 v2 microarray platform, which contains 50,599 biological probes designed against 27,958 genes and 7,419 lncRNAs in the human genome. Standard industry practices were used to normalize and transform the intensity values to quantify gene expression for each sample. The normalized intensity of ASCL1 expression is set forth in column 1 of FIG. 12 entitled “Microarray Expression.”

[0617] As shown in FIG. 12 the microarray analysis demonstrates that ASCL1 is expressed in a number of lung cancer cell lines indicating that it may provide a marker for detecting, diagnosing or monitoring certain neoplastic disorders and a potential marker of tumors at risk of transition to a neuroendocrine phenotype.

### Example 14

### Expression of ASCL1 by IHC

[0618] Microarray analysis and immunohistochemistry (IHC) was performed on PDX tumor sections to assess the expression of ASCL1 in tumor cells.

[0619] IHC was performed essentially as follows. Planar sections of formalin fixed and paraffin embedded (FFPE) tissues were cut and mounted on glass microscope slides. After xylene de-paraffinization 5 μm sections were pre-treated with Antigen Retrieval Solution (Dako) for 20 mins. at 99° C., cooled to 75° C. and then treated with 0.3% hydrogen peroxide in PBS followed by Avidin/Biotin Blocking Solution (Vector Laboratories). FFPE slides were then blocked with 10% horse serum in 3% BSA in PBS buffer and incubated with a primary anti-ASCL1 antibody (clone SC72.2), diluted to 10 μg/ml in 3% BSA/PBS, for 30 mins. at room temperature. The FFPE slides were incubated with biotin-conjugated horse anti-mouse antibody (Vector Laboratories), diluted to 2.5 μg/ml in 3% BSA/PBS, for 30 mins. at room temperature followed by incubation in streptavidin-HRP (ABC Elite Kit; Vector Laboratories). Chromogenic detection was developed with 3,3′-diaminobenzidine (Thermo Scientific) for 5 mins. at room temperature and tissues were counterstained with Meyer's hematoxylin (IHC World), washed with alcohol and immersed in xylene. Sections were then viewed by brightfield microscopy and ASCL1 expression was noted. Results of the studies are shown in FIG. 12.

[0620] A review of FIG. 12 shows that ASCL1 expression was detected in the nucleus (n) of 293 cells engineered to express ASCL1 (293-ASCL1), but not in naïve 293 cells. PDX tumors were stained by IHC (FIG. 12) and ASCL1 protein expression by IHC correlates with the expected ASCL1 mRNA expression based on microarray results.

[0621] Those skilled in the art will further appreciate that the present invention may be embodied in other specific forms without departing from the spirit or central attributes thereof. In that the foregoing description of the present invention discloses only exemplary embodiments thereof, it is to be understood that other variations are contemplated as being within the scope of the present invention. Accordingly, the present invention is not limited to the particular embodiments that have been described in detail herein. Rather, reference should be made to the appended claims as indicative of the scope and content of the invention.

We claim:

1. A method of treating an adenocarcinoma at risk of transitioning to a neuroendocrine phenotype in a subject, the method comprising administering to the subject a therapeutically effective amount of an anti-DLL3 antibody drug conjugate (ADC), or a pharmaceutically acceptable salt thereof, wherein the antibody drug conjugate (ADC) comprises the formula M-[L-D]n wherein:
M comprises an anti-DLL3 antibody;
L comprises an optional linker;
D comprises a cytotoxic agent; and
n is an integer from 1 to 20.

2. A method of reducing or inhibiting recurrence of an adenocarcinoma at risk of transitioning to a neuroendocrine phenotype in a subject, the method comprising administering to the subject a therapeutically effective amount of an anti-DLL3 antibody drug conjugate (ADC), or a pharmaceutically acceptable salt thereof, wherein the antibody drug conjugate (ADC) comprises the formula M-[L-D]n wherein:
M comprises an anti-DLL3 antibody;
L comprises an optional linker;
D comprises a cytotoxic agent; and
n is an integer from 1 to 20.

3. The method of claim 1 or 2, wherein the adenocarcinoma comprises ASCL1⁺ cells.

4. The method of any one of claims 1-3, wherein the adenocarcinoma shows reduced expression of one or more of Retinoblastoma 1 (RB1), Repressor Element-1 Silencing Transcription Factor (REST), SAM pointed domain-containing Ets transcription factor (SPDEF), Prostaglandin E2 Receptor 4 (PTGER4), and ETS-related gene (ERG), as compared to a control sample.

5. The method of any one of claims 1-4 wherein the adenocarcinoma shows increased expression of paternally expressed 10 (PEG10) as compared to a control sample.

6. The method of any one of claims 1-5, wherein the adenocarcinoma is recurrent, refractory, relapsed or resistant.

7. The method of any one of claims 1-6, wherein the subject has undergone a targeted therapy.

8. The method of any one of claims 1-7, wherein the subject has previously undergone a debulking procedure.

9. The method of any one of claims 1-8, wherein the adenocarcinoma occurs in lung, prostate, genitourinary tract, gastrointestinal tract, thyroid, or kidney.

10. The method of claim 9, wherein the adenocarcinoma comprises prostate cancer.

11. The method of claim 10, wherein the prostate cancer comprises castration resistant prostate cancer.

12. The method of claim 10 or 11, wherein the adenocarcinoma is resistant to androgen deprivation therapy.

13. The method of claim 9, wherein the adenocarcinoma comprises lung cancer.

14. The method of claim 13, wherein the lung cancer comprises non-small cell lung cancer.

15. The method of claim 13 or 14, wherein the adenocarcinoma is characterized as having an activating EGFR mutation.

16. The method of any one of claims 13-15, wherein the adenocarcinoma is resistant to EGFR inhibitor therapy.

17. The method of any one of claims 1-16 wherein the adenocarcinoma is DLL3^{-/low}.

18. The method of any one of claims 1-17, wherein the anti-DLL3 antibody is selected from the group consisting of a monoclonal antibody, primatized antibody, multispecific antibody, bispecific antibody, monovalent antibody, multivalent antibody, anti-idiotypic antibody, diabody, Fab fragment, F(ab′)₂ fragment, Fv fragment, and ScFv fragment; or an immunoreactive fragment thereof.

19. The method of claim 18, wherein the anti-DLL3 antibody is selected from the group consisting of a chimeric antibody, a CDR-grafted antibody, and a humanized antibody.

20. The method of any one of claims 1-19, wherein the anti-DLL3 antibody specifically binds to an epitope within the DSL domain of a DLL3 protein set forth as SEQ ID NO: 1 or 2.

21. The method of any one of claims 1-20, wherein the anti-DLL3 antibody comprises or competes for binding to human DLL3 protein with an antibody comprising a light chain variable region set forth as SEQ ID NO: 149 and a heavy chain variable region set forth as SEQ ID NO: 151.

22. The method of any one of claims 1-21, wherein the anti-DLL3 antibody comprises three complementarity determining regions of a light chain variable region set forth as SEQ ID NO: 149, and three complementarity determining regions of a heavy chain variable region set forth as SEQ ID NO: 151.

23. The method of claim 22, wherein the anti-DLL3 antibody comprises residues 24-34 of SEQ ID NO: 149 for CDR-L1, residues 50-56 of SEQ ID NO: 149 for CDR-L2, residues 89-97 of SEQ ID NO: 149 for CDR-L3, residues 31-35 of SEQ ID NO: 151 for CDR-H1, residues 50-65 of SEQ ID NO: 151 for CDR-H2 and residues 95-102 of SEQ ID NO: 151 for CDR-H3, wherein the residues are numbered according to Kabat.

24. The method of claim 22, wherein the anti-DLL3 antibody comprises a light chain variable region comprising an amino acid sequence set forth as SEQ ID NO: 405 and a heavy chain variable region comprising an amino acid sequence set forth as SEQ ID NO: 407.

25. The method of any one of claims 1-24, wherein the cytotoxic agent is a pyrrolobenzodiazepine (PBD), an auristatin, a maytansinoid, a calicheamicin, or a radioisotope.

26. The method of claim 25, wherein the cytotoxic agent is a pyrrolobenzodiazepine (PBD).

27. The method of claim 26, wherein the PBD is covalently linked to the anti-DLL3 antibody via a linker.

28. The method of claim 27, wherein the cytotoxic agent is a pyrrolobenzodiazepine (PBD) comprising formula AC: [chemical structure]
wherein:
the dotted lines indicate the optional presence of a double bond, and wherein only one of the dotted lines in a given ring can be a double bond;
R² is selected from H, OH, ═O, ═CH₂, CN, R, OR, ═CH—R^{D}, ═C(R^{D})₂, O SO₂ R, CO₂R, COR, and halo, where R^{D} is selected from R, CO₂R, COR, CHO, CO₂H, and halo;
R⁶ and R⁹ are each independently selected from H, R, OH, OR, SH, SR, NH₂, NHR, NRR′, NO₂, Me₃Sn and halo;
R⁷ is selected from H, R, OH, OR, SH, SR, NH₂, NHR, NRR′, NO₂, Me₃Sn and halo;
R¹⁰ is the linker L connected to the anti-DLL3 antibody;
Q is selected from O, S and NH;
R¹¹ is either H, or R or, where Q is O, SO₃M, where M is a metal cation;
R and R′ are each independently selected from optionally substituted C₁₋₁₂ alkyl, C₃₋₂₀ heterocyclyl and C₅₋₂₀ aryl groups, and optionally in relation to the group NRR′, R and R′ together with the nitrogen atom to which they are attached form an optionally substituted 4-, 5-, 6- or 7-membered heterocyclic ring;
X is selected from O, S, and N(H);
R^{2″}, R^{6″}, R^{7″}, R^{9″}, and X″ are as defined according to R², R⁶, R⁷, R⁹, and X, respectively; and
R″ is a C₃₋₁₂ alkylene group, which comprises a chain optionally interrupted by one or more heteroatoms, one or more rings, or both one or more heteroatoms and one or more rings, wherein the optional one or more rings are optionally substituted.

29. The method of claim 28, wherein:
R² is R, wherein R is a C₅₋₂₀ aryl group;
R⁶ and R⁹ are H;
R⁷ is OR, and wherein R is a C₁ alkyl;
Q is O, and wherein R¹¹ is H; and/or
X and X″ are O.

30. The method of claim 27, wherein the PBD comprises:

[chemical structure]

31. The method of any one of claims 1-30, wherein the linker comprises a cleavable linker.

32. The method of claim 31, wherein the cleavable linker comprises a dipeptide.

33. The method of claim 32, wherein the dipeptide is Phe-Lys, Val-Ala, Val-Lys, Ala-Lys, Val-Cit, Phe-Cit, Leu-Cit, Ile-Cit, Phe-Arg, or Trp-Cit.

34. The method of claim 33, wherein the dipeptide is Val-Ala.

35. The method of any one of claims 1-34, wherein the antibody drug conjugate comprises the structure: [chemical structure]
wherein the asterisk indicates the point of attachment of the linker to the cytotoxic agent, and wherein the wavy line indicates the point of attachment to the remaining portion of the linker.

36. The method of any one of claims 30-35, wherein the linker further comprises a maleimide group.

37. The method of claim 27 wherein the PBD covalently linked to the anti-DLL3 antibody via a linker comprises an ADC of a structure selected from the group consisting of: [chemical structure] [chemical structure]
wherein Ab comprises an anti-DLL3 antibody or immunoreactive fragment thereof and n is an integer from about 1 to about 20.

38. A method of treating a subject suffering from a tumor at risk of transitioning to a neuroendocrine phenotype comprising the steps of:
(a) contacting a tumor sample obtained from the subject with an ASCL1 antibody;
(b) detecting the ASCL1 antibody bound to the tumor sample;
(c) selecting a subject having an ASCL1 tumor phenotype; and
(d) treating the subject selected in step (c) with an anti-DLL3 antibody drug conjugate (DLL3 ADC) wherein the tumor sample comprises a DLL3^{-/low} phenotype.

39. The method of claim 38 further comprising the step of contacting the tumor sample with a DLL3 antibody.

40. The method of claims 38 and 39 wherein detecting the ASCL1 antibody is performed using immunohistochemistry.

41. The method of claims 38 to 40, wherein the tumor sample is chemically fixed.

42. The method of claim 41, wherein the tumor sample is chemically fixed using formalin.

43. The method of any one of claims 38-42, wherein the tumor sample is paraffin embedded.

44. The method of claim 38, further comprising the steps:
contacting the tumor sample with an agent that detects one or more of Retinoblastoma 1 (RB1), Repressor Element-1 Silencing Transcription Factor (REST), SAM pointed domain-containing Ets transcription factor (SPDEF), Prostaglandin E2 Receptor 4 (PTGER4), and ETS-related gene (ERG);
detecting the agent in the tumor sample; and
observing a reduced expression of one or more of Retinoblastoma 1 (RB1), Repressor Element-1 Silencing Transcription Factor (REST), SAM pointed domain-containing Ets transcription factor (SPDEF), Prostaglandin E2 Receptor 4 (PTGER4), and ETS-related gene (ERG), as compared to a control sample.

45. The method of claim 38 to 44, further comprising the steps:
contacting the tumor sample with a PEG10 agent that detects paternally expressed 10 (PEG10);
detecting the PEG10 agent of in the tumor sample; and
observing an increase in expression of paternally expressed 10 (PEG10) as compared to a control sample.

46. The method of any one of claims 38-45, wherein the tumor is recurrent, refractory, relapsed or resistant.

47. The method of any one of claims 38-46, wherein the subject has undergone a targeted therapy.

48. The method of any one of claims 38-47, wherein the subject has previously undergone a debulking procedure.

49. The method of any one of claims 38-48, wherein the tumor comprises an adenocarcinoma.

50. The method of claim 49 wherein the adenocarcinoma occurs in lung, prostate, genitourinary tract, gastrointestinal tract, thyroid, or kidney.

51. The method of claim 50, wherein the adenocarcinoma comprises prostate cancer.

52. The method of claim 51, wherein the prostate cancer comprises castration resistant prostate cancer.

53. The method of claim 51 or 52, wherein the prostate cancer is resistant to androgen deprivation therapy.

54. The method of claim 50, wherein the adenocarcinoma comprises lung cancer.

55. The method of claim 54, wherein the lung cancer comprises small cell lung cancer.

56. The method of claim 55, wherein the lung cancer comprises non-small cell lung cancer.

57. The method of claim 55 or 56, wherein the adenocarcinoma is characterized as having an activating EGFR mutation.

58. The method of any one of claims 55-57, wherein the adenocarcinoma is resistant to EGFR inhibitor therapy.

59. The method of any one of claims 38-58, wherein the ASCL1 antibody is conjugated or otherwise associated with a detectable label.

60. The method of any one of claims 38-58, wherein the ASCL1 antibody is unlabeled.

61. The method of claim 60, wherein detecting the ASCL1 antibody further comprises contacting the adenocarcinoma sample of (b) with an antibody that specifically binds to the ASCL1 antibody; and detecting the antibody that specifically binds to the ASCL1 antibody.

62. The method of claims 38-61 wherein the percentage of cells in the DLL3^{-/low} tumor that stain positive when interrogated with a DLL3 antibody is less than about 10%.

63. The method of claims 38-62 wherein the percentage of cells in the DLL3^{-/low} tumor that stain positive when interrogated with a DLL3 antibody is less than about 5%.

64. The method of claims 38-63 wherein the percentage of cells in the DLL3^{-/low} tumor that stain positive when interrogated with a DLL3 antibody is less than about 2%.

65. The method of claims 38-64 wherein the percentage of cells in the DLL3^{-/low} tumor that stain positive when interrogated with a DLL3 antibody is less than about 1%.

The application's sequence listing, which the Patent Office published only in electronic form, follows.

SEQUENCE LISTING (573 sequences)

SEQ ID NO: 1 - protein, 618 aa, Homo sapiens
MVSPRMSGLLSQTVILALIFLPQTRPAGVFELQIHSFGPGPGPGAPRSPCSARLPCRLFFRVCLKPGLSEEAAESPCALGAALSARGPVYTEQPGAPAPDLPLPDGLLQVPFRDAWPGTFSFIIETWREELGDQIGGPAWSLLARVAGRRRLAAGGPWARDIQRAGAWELRFSYRARCEPPAVGTACTRLCRPRSAPSRCGPGLRPCAPLEDECEAPLVCRAGCSPEHGFCEQPGECRCLEGWTGPLCTVPVSTSSCLSPRGPSSATTGCLVPGPGPCDGNPCANGGSCSETPRSFECTCPRGFYGLRCEVSGVTCADGPCFNGGLCVGGADPDSAYICHCPPGFQGSNCEKRVDRCSLQPCRNGGLCLDLGHALRCRCRAGFAGPRCEHDLDDCAGRACANGGTCVEGGGAHRCSCALGFGGRDCRERADPCAARPCAHGGRCYAHFSGLVCACAPGYMGARCEFPVHPDGASALPAAPPGLRPGDPQRYLLPPALGLLVAAGVAGAALLLVHVRRRGHSQDAGSRLLAGTPEPSVHALPDALNNLRTQEGSGDGPSSSVDWNRPEDVDPQGIYVISAPSIYAREVATPLFPPLHTGRAGQRQHLLFPYPSSILSVK

SEQ ID NO: 2 - protein, 587 aa, Homo sapiens
MVSPRMSGLLSQTVILALIFLPQTRPAGVFELQIHSFGPGPGPGAPRSPCSARLPCRLFFRVCLKPGLSEEAAESPCALGAALSARGPVYTEQPGAPAPDLPLPDGLLQVPFRDAWPGTFSFIIETWREELGDQIGGPAWSLLARVAGRRRLAAGGPWARDIQRAGAWELRFSYRARCEPPAVGTACTRLCRPRSAPSRCGPGLRPCAPLEDECEAPLVCRAGCSPEHGFCEQPGECRCLEGWTGPLCTVPVSTSSCLSPRGPSSATTGCLVPGPGPCDGNPCANGGSCSETPRSFECTCPRGFYGLRCEVSGVTCADGPCFNGGLCVGGADPDSAYICHCPPGFQGSNCEKRVDRCSLQPCRNGGLCLDLGHALRCRCRAGFAGPRCEHDLDDCAGRACANGGTCVEGGGAHRCSCALGFGGRDCRERADPCAARPCAHGGRCYAHFSGLVCACAPGYMGARCEFPVHPDGASALPAAPPGLRPGDPQRYLLPPALGLLVAAGVAGAALLLVHVRRRGHSQDAGSRLLAGTPEPSVHALPDALNNLRTQEGSGDGPSSSVDWNRPEDVDPQGIYVISAPSIYAREA

SEQ ID NO: 3 - protein, 5 aa, Homo sapiens
QPGAP

SEQ ID NO: 4 - protein, 4 aa, Homo sapiens
  misc_feature (2)..(2): Xaa can be any naturally occurring amino acid
GXRP

SEQ ID NO: 5 - protein, 107 aa, Homo sapiens [sequence omitted]

SEQ ID NO: 6 - protein, 329 aa, Homo sapiens
ASTKGPSVFPLAPSSKSTSGGTAALGCLVKDYFPEPVTVSWNSGALTSGVHTFPAVLQSSGLYSLSSVVTVPSSSLGTQTYICNVNHKPSNTKVDKKVEPKSCDKTHTCPPCPAPELLGGPSVFLFPPKPKDTLMISRTPEVTCVVVDVSHEDPEVKFNWYVDGVEVHNAKTKPREEQYNSTYRVVSVLTVLHQDWLNGKEYKCKVSNKALPAPIEKTISKAKGQPREPQVYTLPPSRDELTKNQVSLTCLVKGFYPSDIAVEWESNGQPENNYKTTPPVLDSDGSFFLYSKLTVDKSRWQQGNVFSCSVMHEALHNHYTQKSLSLSPG

SEQ ID NO: 7-19 - skipped (13 entries)

SEQ ID NO: 20 - DNA, 324 bp, Mus musculus
  misc_feature (1)..(324): SC16.3 VL
  CDS (1)..(324)
caaattgttctcacccagtctccagcaatcatgtctgtatctctaggggaacgggtcaccatgacctgcactgccagctcaagtgtaagttccagttacttgcactggtaccaacaaaagccaggatcctcccccaaactctggatttatagcacatccaacctggcttctggagtcccagctcgcttcagtggcagtgggtctgggacctcttattttttcacaatcagcagcatggaggctgaagatgctgccacttattactgccaccagtatcatcgttccccattcacgttcggcgcggggacaaagttgaaaataaga

SEQ ID NO: 21 - protein, 108 aa, Mus musculus
QIVLTQSPAIMSVSLGERVTMTCTASSSVSSSYLHWYQQKPGSSPKLWIYSTSNLASGVPARFSGSGSGTSYFFTISSMEAEDAATYYCHQYHRSPFTFGAGTKLKIR

SEQ ID NO: 22 - DNA, 369 bp, Mus musculus
  misc_feature (1)..(369): SC16.3 VH
  CDS (1)..(369)
caggttactctgaaagagtctggccctgggatattgcagccctcccagaccctcagtctgacttgttctttctctgggttttcactgagcacttctggtatgggtgtaggctggattcgtcagccatcagggaagggtctggagtggctggcacacatttggtgggatgatgtcaagcgctataacccagccctgaagagccgactaactatctccaaggatacctccagcagccaggtattcctcaagatcgccagtgtggacactgcagatactgccacatactactgtgctcgaatagctgactatggcggagattactatgctatggactactggggtcaaggaacctcagtcaccgtctcctca

SEQ ID NO: 23 - protein, 123 aa, Mus musculus
QVTLKESGPGILQPSQTLSLTCSFSGFSLSTSGMGVGWIRQPSGKGLEWLAHIWWDDVKRYNPALKSRLTISKDTSSSQVFLKIASVDTADTATYYCARIADYGGDYYAMDYWGQGTSVTVSS

SEQ ID NO: 24 - DNA, 321 bp, Mus musculus
  misc_feature (1)..(321): SC16.4 VL
  CDS (1)..(321)
gatatccagatgacacagactacatcttccctgtctgcctctctgggagacagagtcaccatcagttgcagggcaagtcaggacattagcaattatttaaactggtatcagcagaaaccagatggaactgttaaactcctgatctactacacatcaagattacactcaggcgtcccatcaaggttcagtggcagtgggtctggaacagattattctctcaccattagcaacctggagctagaagatattgccacttacttttgccaacagggtgatatgcttccgtggacgttcggtggaggcaccaagctggaaatcaaa

SEQ ID NO: 25 - protein, 107 aa, Mus musculus
DIQMTQTTSSLSASLGDRVTISCRASQDISNYLNWYQQKPDGTVKLLIYYTSRLHSGVPSRFSGSGSGTDYSLTISNLELEDIATYFCQQGDMLPWTFGGGTKLEIK

SEQ ID NO: 26 - DNA, 351 bp, Mus musculus
  misc_feature (1)..(351): SC16.4 VH
  CDS (1)..(351)
cagatccagttggtgcagtctggacctgagctgaagaagcctggagagacagtcaagatctcctgcaaggcttctggttataccttcacagactattcaatgcactgggtgaagcaggctccaggaaagggtttaaagtggatgggctggataaacactgagactggtgagccaggatatgcagatgacttcaagggacggtttgccttctctttggaaacctctgccagcactgcctatttgcagatcaacaacctcaaaaatgaggacacggctacatatttctgtgctcggtacgacgggtatgctatggactattggggtcaaggaacctcagtcaccgtctcctca

SEQ ID NO: 27 - protein, 117 aa, Mus musculus
QIQLVQSGPELKKPGETVKISCKASGYTFTDYSMHWVKQAPGKGLKWMGWINTETGEPGYADDFKGRFAFSLETSASTAYLQINNLKNEDTATYFCARYDGYAMDYWGQGTSVTVSS

SEQ ID NO: 28 - DNA, 318 bp, Mus musculus
  misc_feature (1)..(318): SC16.5 VL
  CDS (1)..(318)
caaattgttctcacccagtctccagcaatcatgtctgcatctccaggggagaaggtcaccatgacctgcagtgccagctcaagtgtaagttacatgcactggtaccagcagaagtcaggcacctcccccaaaagatggatttatgacacatccaaactggcttctggagtccctgctcgcttcagtggcagtgggtctgggacctcttactctctcacaatcagcagcatggaggctgaagatgctgccacttattactgccagcagtggactagaaacccgctcacgttcggggctggaaccaagctggagctgaaa

SEQ ID NO: 29 - protein, 106 aa, Mus musculus
QIVLTQSPAIMSASPGEKVTMTCSASSSVSYMHWYQQKSGTSPKRWIYDTSKLASGVPARFSGSGSGTSYSLTISSMEAEDAATYYCQQWTRNPLTFGAGTKLELK

SEQ ID NO: 30 - DNA, 372 bp, Mus musculus
  misc_feature (1)..(372): SC16.5 VH
  CDS (1)..(372)
caggttactctgaaagagtctggccctgggatattgcagccctcccagaccctcagtctgacttgttctttctctgggttttcactgagcacttctggtatgggtgtaggctggattcgtcagccttcaggagagggtctagagtggctggcagacatttggtgggatgacaataagtactataacccatccctgaagagccggctcacaatctccaaggatacctccagcaaccaggtattcctcaagatcaccagtgtggacactgcagatactgccacttactactgtgctcgaagagttaactatgtttacgacccgtactatgctatggactactggggtcaaggaacctcagtcaccgtctcctca

SEQ ID NO: 31 - protein, 124 aa, Mus musculus
QVTLKESGPGILQPSQTLSLTCSFSGFSLSTSGMGVGWIRQPSGEGLEWLADIWWDDNKYYNPSLKSRLTISKDTSSNQVFLKITSVDTADTATYYCARRVNYVYDPYYAMDYWGQGTSVTVSS

SEQ ID NO: 32 - DNA, 336 bp, Mus musculus
  misc_feature (1)..(336): SC16.7 VL
  CDS (1)..(336)
aacattatgatgacacagtcgccatcatctctggctgtgtctgcaggagaaaaggtcactatgagctgtaagtccagtcaaagtgttttatacagttcaaatcagaagaactacttggcctggtaccaacagaaaccagggcagtctcctaaactgctgatctactgggcatccactagggaatctggtgtccctgatcgcttcacaggcagtggatctgggacagattttactcttaccatcagcactgtacaagttgaagacctggcagtttattactgtcatcaatacctctcctcgtggacgttcggtggaggcaccaagctggaaatcaaa

SEQ ID NO: 33 - protein, 112 aa, Mus musculus
NIMMTQSPSSLAVSAGEKVTMSCKSSQSVLYSSNQKNYLAWYQQKPGQSPKLLIYWASTRESGVPDRFTGSGSGTDFTLTISTVQVEDLAVYYCHQYLSSWTFGGGTKLEIK

SEQ ID NO: 34 - DNA, 357 bp, Mus musculus
  misc_feature (1)..(357): SC16.7 VH
  CDS (1)..(357)
gaggtccagctgcaacagtctggacctgagctggtgaagcctggggcttcagtgaagatttcctgcaaggcttctggttactcattcactggctataaaatgcactgggtgaagcaaagccatgtaaagagccttgagtggattggacgtattaatccttacaatggtgctactagctacaaccagaatttcaaggacaaggccaccttgactgtagataagtcctccagcacagcctacatggacctccacagcctgacatctgaggactctgcagtctatttctgtgcaagaggggactataggtacgactggtttgcttactggggccaagggactctggtcactgtctctgca

SEQ ID NO: 35 - protein, 119 aa, Mus musculus
EVQLQQSGPELVKPGASVKISCKASGYSFTGYKMHWVKQSHVKSLEWIGRINPYNGATSYNQNFKDKATLTVDKSSSTAYMDLHSLTSEDSAVYFCARGDYRYDWFAYWGQGTLVTVSA

SEQ ID NO: 36 - DNA, 321 bp, Mus musculus
  misc_feature (1)..(321): SC16.8 VL
  CDS (1)..(321)
gaaatccagatgacccagtctccatcctctatgtctgcatctctgggagacagaataaccatcacttgccaggcaactcaagacattgttaagaatttaaactggtatcagcagaaaccagggaaacccccttcattcctgatctattatgcaattgaactggcagaaggggtcccatcaaggttcagtggcagtgggtctgggtcagactattctctgacaatcagcaacctggagtctgaagattttgcagactattactgtctacagttttatgagtttccgttcacgttcggtgctgggaccaagctggagctgaaa

SEQ ID NO: 37 - protein, 107 aa, Mus musculus
EIQMTQSPSSMSASLGDRITITCQATQDIVKNLNWYQQKPGKPPSFLIYYAIELAEGVPSRFSGSGSGSDYSLTISNLESEDFADYYCLQFYEFPFTFGAGTKLELK

SEQ ID NO: 38 - DNA, 363 bp, Mus musculus
  misc_feature (1)..(363): SC16.8 VH
  CDS (1)..(363)
caggcccagctgcagcagtctggagctgagctggtaaggcctgggacttcagtgaaggtgtcctgcaaggcttctggatacgccttcactaattacttgatagagtgggtaaagcagaggcctggacagggccttgagtggattggagtgattaatcctggaactggtggtactaactacaatgagaacttcaagggcaaggcaactctgactgcagacaaatcctccagtactgcctacatgcagctcagcagcctgacatctgatgactctgcggtctatttctgtgcaagatccccctatgattaccacgagggtgctatggactactggggtcaaggaacctcagtcaccgtctcctca

SEQ ID NO: 39 - protein, 121 aa, Mus musculus
QAQLQQSGAELVRPGTSVKVSCKASGYAFTNYLIEWVKQRPGQGLEWIGVINPGTGGTNYNENFKGKATLTADKSSSTAYMQLSSLTSDDSAVYFCARSPYDYHEGAMDYWGQGTSVTVSS

SEQ ID NO: 40 - DNA, 324 bp, Mus musculus
  misc_feature (1)..(324): SC16.10 VL
  CDS (1)..(324)
caaattgttctcacccagtctccagcaatcatgtctgcatctctaggggaacgggtcaccatgacctgcactgccagctcaagtgtaagttccagttacttgcactggtaccagcagaagccaggatcatcccccaaactctggatttatagcacttccaacctggcttctggagtcccaactcgcttcagtggcagtgggtctgggacctcttactctctcacaatcagcagcatggaggctgaagatgctgccacttattactgccaccagtatcatcgttccccattcacgttcggctcggggacaaagttggaaataaaa

SEQ ID NO: 41 - protein, 108 aa, Mus musculus
QIVLTQSPAIMSASLGERVTMTCTASSSVSSSYLHWYQQKPGSSPKLWIYSTSNLASGVPTRFSGSGSGTSYSLTISSMEAEDAATYYCHQYHRSPFTFGSGTKLEIK

SEQ ID NO: 42 - DNA, 360 bp, Mus musculus
  misc_feature (1)..(360): SC16.10 VH
  CDS (1)..(360)
caggttactctgaaagagtctggccctgggatattgcagtcctcccagaccctcagtctgacttgttctttctctgggttttcactgagcacttctggtatgggtgtaggctggattcgtcagccatcagggaagggtctggagtggctggcacacatttggtgggatgatgtcaagcgctataacccagtcctgaagagccgactgactatctccaaggatacctccagcagccaggtattcctcaagatcgccagtgtggacactgcagatactgccacatactattgtgctcgattagttgatgatctgtactactttgactactggggccaaggcaccactctcacagtctcctca

SEQ ID NO: 43 - protein, 120 aa, Mus musculus
QVTLKESGPGILQSSQTLSLTCSFSGFSLSTSGMGVGWIRQPSGKGLEWLAHIWWDDVKRYNPVLKSRLTISKDTSSSQVFLKIASVDTADTATYYCARLVDDLYYFDYWGQGTTLTVSS

SEQ ID NO: 44 - DNA, 336 bp, Mus musculus
  misc_feature (1)..(336): SC16.11 VL
  CDS (1)..(336)
gatgttgagatgacccagactccactcactttgtcggttaccattggacaaccagcctccatctcttgcaagtcaagtcagagcctctcagacagtgatggaaagacatatttgaattggatgtttcagaggccaggccggtctccaaagcgcctaatctatctggtgtctaaactggactctggagtccctgacaggttcactggcagtggatcagggacagatttcacactgaaaatcagcagagtggaggctgaggatttgggagtttactattgctggcaaggtaaacattttccgtggacgttcggtggaggcaccaagctggaaatcaaa

SEQ ID NO: 45 - protein, 112 aa, Mus musculus
DVEMTQTPLTLSVTIGQPASISCKSSQSLSDSDGKTYLNWMFQRPGRSPKRLIYLVSKLDSGVPDRFTGSGSGTDFTLKISRVEAEDLGVYYCWQGKHFPWTFGGGTKLEIK

SEQ ID NO: 46 - DNA, 351 bp, Mus musculus
  misc_feature (1)..(351): SC16.11 VH
  CDS (1)..(351)
cagatccagttggtgcagtctggacctgagctgaagaagcctggagagacagtcaagatctcctgcaaggcttctggttataccttcacagactattcaatgcactgggtgaagcaggctccaggaaagggtttaaagtggatgggctggataaacactgagactgttgagccaacatatgcagatgacttcatgggacggtttgccttctctttggaaacctctgccagcactgcctttttgcagatcaacaacctcgaaaatgaggacacggctacatatttctgtgctagatttggttcctatgctatggactactggggtcaaggaacctcagtcaccgtctcctca

SEQ ID NO: 47 - protein, 117 aa, Mus musculus
QIQLVQSGPELKKPGETVKISCKASGYTFTDYSMHWVKQAPGKGLKWMGWINTETVEPTYADDFMGRFAFSLETSASTAFLQINNLENEDTATYFCARFGSYAMDYWGQGTSVTVSS

SEQ ID NO: 48 - DNA, 318 bp, Mus musculus
  misc_feature (1)..(318): SC16.13 VL
  CDS (1)..(318)
caaattgttctcacccagtctccagcactcgtgtctgcatctccaggggagaaggtcaccatgacctgcagtgccagctcaagtgtaagttacatgtactggtaccagcagaaaccaagatcctcccccaaaccctggatttatctcacatccaacctggcttctggagtccctgctcgcttcagtggcagtgggtctgggacctcttactctctcacaatcagcagcatggaggctgaagatgctgccacttattactgccagcagtggcgtagtaacccattcacgttcggctcggggacaaagttggaaataaaa

SEQ ID NO: 49 - protein, 106 aa, Mus musculus
QIVLTQSPALVSASPGEKVTMTCSASSSVSYMYWYQQKPRSSPKPWIYLTSNLASGVPARFSGSGSGTSYSLTISSMEAEDAATYYCQQWRSNPFTFGSGTKLEIK

SEQ ID NO: 50 - DNA, 372 bp, Mus musculus
  misc_feature (1)..(372): SC16.13 VH
  misc_feature (372)..(372): The 'n' at position 372 may be a or g or c or t
  CDS (1)..(372)
caggttactctgaaagagtctggccctgggatattgcagccctcccagaccctcagtctgacttgttctttctctgggttttcactgagcacttctggtatgggtgtaggctggattcggcagccatcagggaagggtctggagtggctggcacacatttggtgggatgatgtcaagcgctataacccagccctgaagagccgactgactatctccaaggatacctccagcagccaggtattcctcaagatcgccagtgtggacactgcagatactgccacatactactgtgctcgcatagtttcctttgataacgacgttgtctctgctatggactactggggtcaaggaacctcagtcaccgtctcctcn

SEQ ID NO: 51 - protein, 124 aa, Mus musculus
  misc_feature (124)..(124): The 'Xaa' at location 124 stands for Ser.
QVTLKESGPGILQPSQTLSLTCSFSGFSLSTSGMGVGWIRQPSGKGLEWLAHIWWDDVKRYNPALKSRLTISKDTSSSQVFLKIASVDTADTATYYCARIVSFDNDVVSAMDYWGQGTSVTVSX

SEQ ID NO: 52 - DNA, 321 bp, Mus musculus
  misc_feature (1)..(321): SC16.15 VL
  CDS (1)..(321)
gacatccagatgactcagtctccagcctccctggctgcatctgtgggagaaactgtcgccatcacatgtcgagcaagtgagaacatttactacaatttagcatggtatcagcagaaacaagggaaatctcctcagctcctgatctatactgcaaacagtttggaagatggtgtcccatcgaggttcagtggcagtggatctgggacacagtattctttgaagatcaacagcatgcagcctgaagattccgcaacttatttctgtaaacaggcttatgacgttcctccgacgttcggtggaggcaccaagctggaaatcaaa

SEQ ID NO: 53 - protein, 107 aa, Mus musculus
DIQMTQSPASLAASVGETVAITCRASENIYYNLAWYQQKQGKSPQLLIYTANSLEDGVPSRFSGSGSGTQYSLKINSMQPEDSATYFCKQAYDVPPTFGGGTKLEIK

SEQ ID NO: 54 - DNA, 351 bp, Mus musculus
  misc_feature (1)..(351): SC16.15 VH
  CDS (1)..(351)
caggtccagcttcagcagtctggggctgaactggcaaaacctggggcctcagtgaagatgtcctgtaaggcttctggctacacctttactcgctactggatacactggataaaacagaggcctggacagggtctggaatggattggatacattaatcctacaactgtttatactgagttcaatcagaacttcaaggacaaggccactttgactgcagacaaatcctccaccacagcctccatgcaactgagcagcctgacatctgaggactctgcagtctattactgtgcaagaggcggtagtaacttctttgactactggggccaaggcaccactctcacagtctcctca

SEQ ID NO: 55 - protein, 117 aa, Mus musculus
QVQLQQSGAELAKPGASVKMSCKASGYTFTRYWIHWIKQRPGQGLEWIGYINPTTVYTEFNQNFKDKATLTADKSSTTASMQLSSLTSEDSAVYYCARGGSNFFDYWGQGTTLTVSS

SEQ ID NO: 56 - DNA, 321 bp, Mus musculus
  misc_feature (1)..(321): SC16.18 VL
  CDS (1)..(321)
gatatccagatgacacagactacatcctccctgtctgcctctttgggagacagagtcaccatcagttgcagggcaagtcagaatattatcaattatttaaactggtatcagcagaagccagatggaactgttaaactcctgatctactacacatcaagattacactcaggagtcccatcaaggttcagtggcagtgggtctgggacagattattctctcaccatcagcaacctggaacctgaagatattgccacttactattgtcaacagtatagtgagcgtccgtacacgttcgggggggggaccaagctggaaataaaa

SEQ ID NO: 57 - protein, 107 aa, Mus musculus
DIQMTQTTSSLSASLGDRVTISCRASQNIINYLNWYQQKPDGTVKLLIYYTSRLHSGVPSRFSGSGSGTDYSLTISNLEPEDIATYYCQQYSERPYTFGGGTKLEIK

SEQ ID NO: 58 - DNA, 351 bp, Mus musculus
  misc_feature (1)..(351): SC16.18 VH
  CDS (1)..(351)
gaagtgaagctggaggagtcaggaggaggcttggtacaacctggagaatccatgaaactctcttgtgctgcttctggattcacttttagtgatgcctggatggactgggtccgccagtctccagagaagggacttgagtgggttgctgaaattagaaacaaagctaataatcatgcaacatattatgctgagtctgtgaaagggaaattcaccatctcaagagatgattccaaaagtagagtgtacctgcaaatgaacaacttaagagctgcagacactggcatttattactgtacggcctatagtaactttgcttactggggccaagggactctggtcactgtctctaca

SEQ ID NO: 59 - protein, 117 aa, Mus musculus
EVKLEESGGGLVQPGESMKLSCAASGFTFSDAWMDWVRQSPEKGLEWVAEIRNKANNHATYYAESVKGKFTISRDDSKSRVYLQMNNLRAADTGIYYCTAYSNFAYWGQGTLVTVST

SEQ ID NO: 60 - DNA, 318 bp, Mus musculus
  misc_feature (1)..(318): SC16.19 VL
  CDS (1)..(318)
gacatccagatgacacagtctccatcctcactgtctgcatctctgggaggcaaagtcaccttcacttgcaaggcaagccaagacattcacaagtatgtagcttggtaccaacacaagcctggaaaaggtcctaggctgctcatacattacacatctacattacagccaggcatctcatcaaggttcagtggaagtgggtctgggagagattattccttcagcatcagcaacctggagcctgaagatattgcaacttattattgtctacagtataataatctgtacacgttcggaggggggaccaagctggaaataaaa

SEQ ID NO: 61 - protein, 106 aa, Mus musculus
DIQMTQSPSSLSASLGGKVTFTCKASQDIHKYVAWYQHKPGKGPRLLIHYTSTLQPGISSRFSGSGSGRDYSFSISNLEPEDIATYYCLQYNNLYTFGGGTKLEIK

SEQ ID NO: 62 - DNA, 354 bp, Mus musculus
  misc_feature (1)..(354): SC16.19 VH
  CDS (1)..(354)
gaggttcagctgcagcagtctggggctgagcttgtgaggccaggggcctcagtcaagttgtcctgcacagcttctggcttcaacattaaagacagccttttgcactgggtgaagcagaggcctgaaaagggcctggagtggattgggtggattgatcctgaggatggtgaaactaaatatgccccgaacttccaggacaaggccactataactacagactcatcctccaacacagcctacctgcaactcatcagcctgacatctgttgacactgccatctattactgtgcctatggtaactacgtgcggcactttgactactggggccaaggcaccactctcacagtctcctca

SEQ ID NO: 63 - protein, 118 aa, Mus musculus
EVQLQQSGAELVRPGASVKLSCTASGFNIKDSLLHWVKQRPEKGLEWIGWIDPEDGETKYAPNFQDKATITTDSSSNTAYLQLISLTSVDTAIYYCAYGNYVRHFDYWGQGTTLTVSS

SEQ ID NO: 64 - DNA, 321 bp, Mus musculus
  misc_feature (1)..(321): SC16.20 VL
  CDS (1)..(321)
gaaatccagatgacccagtctccatcctctatgtctgcatctctgggagacagaataaccatcacttgccaggcaactcaagacattgttaagaatttaaactggtatcagcagaaaccagggaaacccccttcattcctgatctattatgcaactgaactggcagaaggggtcccatcaaggttcagtggcagtgggtctgggtcagactattctctgacaatcaggaacctggagtctgaagactttgcagaccattactgtctacagttttatgagtttccgttcacgttcggtgctgggaccaagctggagctgaaa

SEQ ID NO: 65 - protein, 107 aa, Mus musculus
EIQMTQSPSSMSASLGDRITITCQATQDIVKNLNWYQQKPGKPPSFLIYYATELAEGVPSRFSGSGSGSDYSLTIRNLESEDFADHYCLQFYEFPFTFGAGTKLELK

SEQ ID NO: 66 - DNA, 363 bp, Mus musculus
  misc_feature (1)..(363): SC16.20 VH
  CDS (1)..(363)
caggtccagttgcagcagtctggaactgagctggtaaggcctgggacttcagtgagggtgtcctgcaaggcttctggatacgccttcggtaatcacttgattgagtgggtgaagcagaggcctggacagggccttgagtggattggagtgattaatcctggaactggtggtactcactacaatgagaagttcaaggacaaggcaagactgaccgcagacaaatcctccaacactgcctacatgcacctcaacagcctgacatctgatgactctgcggtctatttctgtgcaagatccccctatgattaccacgagggtgctatggactactggggtcaaggaacctcagtcaccgtctcctca

SEQ ID NO: 67 - protein, 121 aa, Mus musculus
QVQLQQSGTELVRPGTSVRVSCKASGYAFGNHLIEWVKQRPGQGLEWIGVINPGTGGTHYNEKFKDKARLTADKSSNTAYMHLNSLTSDDSAVYFCARSPYDYHEGAMDYWGQGTSVTVSS

SEQ ID NO: 68 - DNA, 339 bp, Mus musculus
  misc_feature (1)..(339): SC16.21 VL
  CDS (1)..(339)
gacattgtgatgacacagtctccatcctccctggctatgtcagtaggacagaaggtcactatgagctgcaagtccagtcagagccttttaaatagtagcaatcaaaagaattatttggcctggtatcagcaggaaccaggacagtctcctaaacttctggtatcctttgcatccactagggaatctggggtccctgatcgcttcacaggcagtggatctgggacagatttcactcttaccatcagcggtgtgcaggctgaagacctggcagtttattactgtcagcaacattatagcattccgctcacgttcggtgctgggaccaagctggagctgaaa

SEQ ID NO: 69 - protein, 113 aa, Mus musculus
DIVMTQSPSSLAMSVGQKVTMSCKSSQSLLNSSNQKNYLAWYQQEPGQSPKLLVSFASTRESGVPDRFTGSGSGTDFTLTISGVQAEDLAVYYCQQHYSIPLTFGAGTKLELK

SEQ ID NO: 70 - DNA, 372 bp, Mus musculus
  misc_feature (1)..(372): SC16.21 VH
  CDS (1)..(372)
caggttcagctacaacagtctggacctgagctggtgaagcctggggcctcagtgaagatttcctgcaaggcttctggctatgcattcagtagctcctggatgaactgggtgaagcagaggcctggaaagggtcttgagtggattggacggatttatcctggagatggagatactaactacaatgggaagttcaagggcaaggccacactgactgcagacaaatcctccagcacagcctacatgcaactcagcagcctgacatctgaggactctgcggtctacttctgtgcaatgggtatttataactacgatggtagccgttactattctatggactactggggtcaaggaacctcagtcaccgtctcctca

SEQ ID NO: 71 - protein, 124 aa, Mus musculus
QVQLQQSGPELVKPGASVKISCKASGYAFSSSWMNWVKQRPGKGLEWIGRIYPGDGDTNYNGKFKGKATLTADKSSSTAYMQLSSLTSEDSAVYFCAMGIYNYDGSRYYSMDYWGQGTSVTVSS

SEQ ID NO: 72 - DNA, 321 bp, Mus musculus
  misc_feature (1)..(321): SC16.22 VL
  CDS (1)..(321)
gatatccagatgacacagactacatcctccctgtctgcctctctgggagacagagtcaccatcagttgcagggcaagtcaggacattaagaattatttaaactggtatcagcagaaaccagatggaactgttaaacccctgatctactacacatcaagagtacactcaggagtcccatcaaggttcagtggcagtgggtctggaacagattattctctcaccattagcaacctggagcaagaagatattgccacttacttttgccagcagggttatacgcttccattcacgttcggctcggggacaaagttggaaathaar

SEQ ID NO: 73 - protein, 107 aa, Mus musculus
DIQMTQTTSSLSASLGDRVTISCRASQDIKNYLNWYQQKPDGTVKPLIYYTSRVHSGVPSRFSGSGSGTDYSLTISNLEQEDIATYFCQQGYTLPFTFGSGTKLEIK

SEQ ID NO: 74 - DNA, 360 bp, Mus musculus
  misc_feature (1)..(360): SC16.22 VH
  CDS (1)..(360)
caggtccagctgcagcagcctggggctgaactggtgaagcctggggcttcagtgaagctgtcctgtaaggcttctggatacaccttcactacctactggatgcactgggtgaagcagaggcctggacaaggccttgagtggatcggagagattgatccttctgatagttatacttactacaatcaaaagttcaagggcaaggccacattgactgtagacaaatcctccagcacagcctacatgcaactcagcagcctgacatctgaggactctgcggtctattattgtgcaagaggggactatggtaacccctatgctatggactactggggtcaaggatcctcagtcaccgtctcctca

SEQ ID NO: 75 - protein, 120 aa, Mus musculus
QVQLQQPGAELVKPGASVKLSCKASGYTFTTYWMHWVKQRPGQGLEWIGEIDPSDSYTYYNQKFKGKATLTVDKSSSTAYMQLSSLTSEDSAVYYCARGDYGNPYAMDYWGQGSSVTVSS

SEQ ID NO: 76 - DNA, 324 bp, Mus musculus
  misc_feature (1)..(324): SC16.23 VL
  CDS (1)..(324)
caaattgttctcacccagtctccagcaatcatgtctgcatctcctggggagaaggtcaccttgacctgcagtgccagctcaagtgtaagttccaggtacttgtactggtaccagcagaagccaggatcctcccccaaactctggatttatagcacatccaacctggcttctggagtccctgctcgcttcagtggcagtgggtctgggacctcttactctctcataatcagcagcatggaggctgaagatgctgcctcttatttctgccatcagtggagtaattacccactcacgttcggtgctgggaccaagctggagctgaaa

SEQ ID NO: 77 - protein, 108 aa, Mus musculus
QIVLTQSPAIMSASPGEKVTLTCSASSSVSSRYLYWYQQKPGSSPKLWIYSTSNLASGVPARFSGSGSGTSYSLIISSMEAEDAASYFCHQWSNYPLTFGAGTKLELK

SEQ ID NO: 78 - DNA, 372 bp, Mus musculus
  misc_feature (1)..(372): SC16.23 VH
  CDS (1)..(372)
caggttactctgaaagagtctggccctgggatattgcagccctcccagaccctcagtctgacttgttctttctctgggttttcactgagcacttctaatacgggcataggctggattcgtcagccttcagggacgggtctggagtggctggcacacatttggtggaatgatgataagtactataatccatccctgaagagccggctcacaatctccaaggaaacctccaacaaccaggtattcctcaagatcaccaatgtggacactgcagatactgcctcatacttctgtgttcaaatcgggcgcgactacagtaactacgcctggtatttcgatgtctggggcgcagggaccacggtcaccgtctcctca

SEQ ID NO: 79 - protein, 124 aa, Mus musculus
QVTLKESGPGILQPSQTLSLTCSFSGFSLSTSNTGIGWIRQPSGTGLEWLAHIWWNDDKYYNPSLKSRLTISKETSNNQVFLKITNVDTADTASYFCVQIGRDYSNYAWYFDVWGAGTTVTVSS

SEQ ID NO: 80 - DNA, 318 bp, Mus musculus
  misc_feature (1)..(318): SC16.25 VL
  CDS (1)..(318)
caaattgttctcacccagtctccagcaatcatgtctgcatctccaggggagaaggtcaccatgacctgcagtgccagctcaagtgtaagttacatgcactggtaccagcagaagtcaggcacctcccccaaaagatggatttatgactcatccaaactggcttctggagtccctgctcgcttcagtggcagtgggtctgggacctcttactctctcacaatcagcagcatggaggctgaagatgctgccacttattactgccagcagtggagtagtaacccgctcacgttcggtgctgggaccaagctggagctgaaa

SEQ ID NO: 81 - protein, 106 aa, Mus musculus
QIVLTQSPAIMSASPGEKVTMTCSASSSVSYMHWYQQKSGTSPKRWIYDSSKLASGVPARFSGSGSGTSYSLTISSMEAEDAATYYCQQWSSNPLTFGAGTKLELK

SEQ ID NO: 82 - DNA, 372 bp, Mus musculus
  misc_feature (1)..(372): SC16.25 VH
  CDS (1)..(372)
caggttactctgaaagagtctggccctgggatattgcagccctcccagaccctcagtctgacttgttctttctctgggttttcactgagcacttctggtatgggtgtaggctggattcgtcagccttcaggagagggtctagagtggctgacagacatttggtgggatgacaataagtactataacccatccctgaagagccggctcacaatctccaaggatacctccagcaaccaggtattcctcaatatcaccagtgtggacactgcagatactgccacttactactgtgctcgaagagttaactattattacgacccgtactatgctatggactactggggtcaaggaacctcagtcaccgtctcctca

SEQ ID NO: 83 - protein, 124 aa, Mus musculus
QVTLKESGPGILQPSQTLSLTCSFSGFSLSTSGMGVGWIRQPSGEGLEWLTDIWWDDNKYYNPSLKSRLTISKDTSSNQVFLNITSVDTADTATYYCARRVNYYYDPYYAMDYWGQGTSVTVSS

SEQ ID NO: 84 - DNA, 336 bp, Mus musculus; identical to SEQ ID NO: 44
  misc_feature (1)..(336): SC16.26 VL
  CDS (1)..(336)

SEQ ID NO: 85 - protein, 112 aa, Mus musculus; identical to SEQ ID NO: 45

SEQ ID NO: 86 - DNA, 351 bp, Mus musculus
  misc_feature (1)..(351): SC16.26 VH
  misc_feature (339)..(339): The 'n' at position 339 may be a or g or c or t
  misc_feature (342)..(342): the 'v' at position 342 may be a or g or c
  misc_feature (345)..(345): The 'n' at position 345 may be a or g or c or t
  misc_feature (348)..(348): The 'n' at position 348 may be a or g or c or t
  misc_feature (351)..(351): The 'n' at position 351 may be a or g or c or t
  CDS (1)..(351)
cagatccagttggtgcagtctggacctgagctgaagaagcctggagagacagtcaagatctcctgcaaggcttctggttattccttcacagactattcaatgcactgggtgaagcaggctccaggaaagggtttaaagtggatgggctggataaacactgagactgttgagccaacatatgcagatgacttcatgggacggtttgccttctctttggaaacctctgccagcactgcctttttgcagatcaacaacctcgaaaatgaggacacggctacatatttctgtgctagatttggttcctatgctatggactactggggtcaaggaacctcagtnacvgtntcntcn

SEQ ID NO: 87 - protein, 117 aa, Mus musculus
  misc_feature (114)..(114): The 'Xaa' at location 114 stands for Thr.
  misc_feature (116)..(116): The 'Xaa' at location 116 stands for Ser.
  misc_feature (117)..(117): The 'Xaa' at location 117 stands for Ser.
QIQLVQSGPELKKPGETVKISCKASGYSFTDYSMHWVKQAPGKGLKWMGWINTETVEPTYADDFMGRFAFSLETSASTAFLQINNLENEDTATYFCARFGSYAMDYWGQGTSVXVXX

SEQ ID NO: 88 - DNA, 318 bp, Mus musculus
  misc_feature (1)..(318): SC16.29 VL
  CDS (1)..(318)
caaattgttctcacccagtctccagcaatcatgtctgcatctccaggggagaaggtcaccataacctgcagtgccagctcaagtgtaagttacatgcactggttccagcagaagccaggcacttctcccaaactctggatttataccacatccaacctggcttctggagtccctgctcgcttcagtggcagtggatctgggacctcttactctctcacagtcagccgaatggaggctgaagatgctgccacttattactgccagcaaaggagtctttatccgtacacgttcggaggggggaccaaggtggaaataaaa

SEQ ID NO: 89 - protein, 106 aa, Mus musculus
QIVLTQSPAIMSASPGEKVTITCSASSSVSYMHWFQQKPGTSPKLWIYTTSNLASGVPARFSGSGSGTSYSLTVSRMEAEDAATYYCQQRSLYPYTFGGGTKVEIK

SEQ ID NO: 90 - DNA, 363 bp, Mus musculus
  misc_feature (1)..(363): SC16.29 VH
  CDS (1)..(363)
caggttcagctacagcagtctggagctgagctggcgaggcccggggcttcagtgaagctgtcctgcaaggcttcaggctacaccttcactgaccagtatataaactgggtgaagcagaggactggacagggccttgagtggattggagagatttatcccggaaggggtaatacttactacaatgagaagttcaagggcaaggccacactgactgcagacaaatcctccagcacagcctacatgcaactcagcagcctgacatctgaggactctgcagtctatttctgtgcaagagaggatggtggttacgacgatgcctggtttgcttactggggccaagggactctggtcactgtctctgca

SEQ ID NO: 91 - protein, 121 aa, Mus musculus
QVQLQQSGAELARPGASVKLSCKASGYTFTDQYINWVKQRTGQGLEWIGEIYPGRGNTYYNEKFKGKATLTADKSSSTAYMQLSSLTSEDSAVYFCAREDGGYDDAWFAYWGQGTLVTVSA

SEQ ID NO: 92 - DNA, 324 bp, Mus musculus
  misc_feature (1)..(324): SC16.30 VL
  CDS (1)..(324)
caaattgttctgacccagtctccaacaatcatgtctgcatctctaggggaacgggtcaccatgacctgcactgccagctcaagtgtaacttccagttacttgcactggtaccagcagaagccaggatcctcccccaaactctggatttatagcacatccaacctggcttctggagtcccagctcgcttcagtggcagtgggtctgggacctcttactctctcacaatcagcagcatggaggctgaagatgctgccacttattactgccaccagtttcatcgttccccattcacgttcggctcggggacaaagttggaaataaaa

SEQ ID NO: 93 - protein, 108 aa, Mus musculus
QIVLTQSPTIMSASLGERVTMTCTASSSVTSSYLHWYQQKPGSSPKLWIYSTSNLASGVPARFSGSGSGTSYSLTISSMEAEDAATYYCHQFHRSPFTFGSGTKLEIK

SEQ ID NO: 94 - DNA, 360 bp, Mus musculus
  misc_feature (1)..(360): SC16.30 VH
  CDS (1)..(360)
caggttactctgaaagagtctggccctgggatattgcagccctcccagaccctcagtctgacttgttctttctctgggttttcactgagcacttctggtatgggtgtaggctggattcgtcagccatcagggaagggtctggagtggctggcacacatttggtgggatgatgtcaagcgctataaaccagccctgaagagccgactgactgtctccaaggatacctccagcaaccaggttttcctcaagatcgccactgtggacgctgcagatactggcacatactactgtgctcgaatcgttgatggtcaccccccgtttgcttactggggccaagggactctggtcactgtctctgca

SEQ ID NO: 95 - protein, 120 aa, Mus musculus
QVTLKESGPGILQPSQTLSLTCSFSGFSLSTSGMGVGWIRQPSGKGLEWLAHIWWDDVKRYKPALKSRLTVSKDTSSNQVFLKIATVDAADTGTYYCARIVDGHPPFAYWGQGTLVTVSA

SEQ ID NO: 96 - DNA, 336 bp, Mus musculus
  misc_feature (1)..(336): SC16.30 VL
  CDS (1)..(336)
gacattgtgctgacccagtctccactctctctgcctgtcaatattggagatcaagcctctatctcttgcaagtctactaagagtcttctgaatagtgatggattcacttatttggactggtatttgcagaggccaggccagtctccacaattcctaatatatttggtttctaatcgattttctggagttccagacaggttcagtggcagtgggtcaggaacagatttcacactcaagatcagcagagtggaggctgaggatttgggagtatattattgcttccagagtaactatcttccgctcacgttcggtgctgggaccaagctggagctgaga

SEQ ID NO: 97 - protein, 112 aa, Mus musculus
DIVLTQSPLSLPVNIGDQASISCKSTKSLLNSDGFTYLDWYLQRPGQSPQFLIYLVSNRFSGVPDRFSGSGSGTDFTLKISRVEAEDLGVYYCFQSNYLPLTFGAGTKLELR

SEQ ID NO: 98 - DNA, 357 bp, Mus musculus
  misc_feature (1)..(357): SC16.31 VH
  CDS (1)..(357)
gaggtccaactgcagcagtctggacctgagctggtgaagcctggggcttcagtgaagatatcctgcaaggcttctggttactcattcagtcgtttctatatgcactgggtgaagcaaagtcctgaaaatagtcttgagtggattggagagattaatcctagcactgggggtacaagctacaaccagaagttcaagggcaaggccacattaactgtagataaatcctccagcacagcctacatgcagctcaagagcctgacatctgaagagtctgcagtctattactgtactaggggttacgggagcaactggtacttcgatgtctggggcgcagggaccacggtcaccgtctccaca

SEQ ID NO: 99 - protein, 119 aa, Mus musculus
EVQLQQSGPELVKPGASVKISCKASGYSFSRFYMHWVKQSPENSLEWIGEINPSTGGTSYNQKFKGKATLTVDKSSSTAYMQLKSLTSEESAVYYCTRGYGSNWYFDVWGAGTTVTVST

SEQ ID NO: 100 - DNA, 321 bp, Mus musculus
  misc_feature (1)..(321): SC16.34 VL
  CDS (1)..(321)
agtattgtgatgacccagactcccaaattcctgcttgtatcagcaggagacagggttaccataacctgcaaggccagtcagagtgtgagtaatgatgtagcttggtaccaacagaagccagggcagtctcctaaactgctgatatactatgcatccaatcgctacagtggagtccctgatcgcttcactggcagtggatatgggacggatttcactttcaccatcagcactgtgcaggctgaagacctggcagtttatttctgtcagcaggattatagctctccgtggacgttcggtggaggcaccaagctggaaatcaaa

SEQ ID NO: 101 - protein, 107 aa, Mus musculus
SIVMTQTPKFLLVSAGDRVTITCKASQSVSNDVAWYQQKPGQSPKLLIYYASNRYSGVPDRFTGSGYGTDFTFTISTVQAEDLAVYFCQQDYSSPWTFGGGTKLEIK

SEQ ID NO: 102 - DNA, 354 bp, Mus musculus
  misc_feature (1)..(354): SC16.34 VH
  CDS (1)..(354)
cagatccagttggtgcagtctggacctgagctgaagaggcctggagagacagtcaagatctcctgcaaggcttctggatataccttcacaaactatggaatgaactgggtgaagcaggctccaggaaagggtttaaagtggatgggctggataaacacgtacactggagacccaacatatgctgatgacttcaagggacggtttgccttctctttggaaacctctgccagcactgcctatttgcagatcaacaacctcaaaaatgaggacacggctacatatttctgtgcaagaattggcggtaatagtccctctgattactggggccaaggcacctctctcacagtctcctca

SEQ ID NO: 103 - protein, 118 aa, Mus musculus
QIQLVQSGPELKRPGETVKISCKASGYTFTNYGMNWVKQAPGKGLKWMGWINTYTGDPTYADDFKGRFAFSLETSASTAYLQINNLKNEDTATYFCARIGGNSPSDYWGQGTSLTVSS

SEQ ID NO: 104 - DNA, 321 bp, Mus musculus
  misc_feature (1)..(321): SC16.35 VL
  CDS (1)..(321)
gatatccagatgacacagactacatcctccctgtctgcctctctgggagacagagtcaccatcagttgcagggcaagtcaggacattagcaattatttaaactggtatcagcagaaaccagatggaactgttaaactcctgatctactacacatcaagattacactcaggagtcccatcaaggttcagtggcagtgggtctggaacagattattctctcaccattagcaacctggagcaagaagatattgccacttacttttgccaacagggtaatacgcttccgtacacgttcggaggggggaccaagctggaaataaaa

SEQ ID NO: 105 - protein, 107 aa, Mus musculus
DIQMTQTTSSLSASLGDRVTISCRASQDISNYLNWYQQKPDGTVKLLIYYTSRLHSGVPSRFSGSGSGTDYSLTISNLEQEDIATYFCQQGNTLPYTFGGGTKLEIK

SEQ ID NO: 106 - DNA, 360 bp, Mus musculus
  misc_feature (1)..(360): SC16.35 VH
  CDS (1)..(360)
gatgtgcagcttcaggagtcgggacctggcctggtgaaaccttctcagtctctgtccctcacctgcactgtcactggctactcaatcaccagtgattatgcctggaactggatccggcagtttccaggaaacaaactggagtggatgggctacataagctacagtggtagcactagctacaacccatctctcaaaagtcgaatctctatcactcgagacacatccaagaaccagttcttcctgcagttgaattctgtgactactgaggacacagccacatattactgtgcaagattttactacggtagtagctatgctatggactactggggtcaaggaacctcagtcaccgtctcctca

SEQ ID NO: 107 - protein, 120 aa, Mus musculus
DVQLQESGPGLVKPSQSLSLTCTVTGYSITSDYAWNWIRQFPGNKLEWMGYISYSGSTSYNPSLKSRISITRDTSKNQFFLQLNSVTTEDTATYYCARFYYGSSYAMDYWGQGTSVTVSS

SEQ ID NO: 108 - DNA, 321 bp, Mus musculus
  misc_feature (1)..(321): SC16.36 VL
  CDS (1)..(321)
gaaacaactgtgacccagtctccagcatccctgtccgtgactacaggagaaaaagtcactatcagatgcataaccacccctgatattgatgatgatatgaactggtaccagcagaagccaggggaacctcctaacctccttatttcagaaggcaatagtcttcgtcctggagtcccatcccgattctccagcagtggctatggcacaaattttgtttttacaattgaaaacacgctctcagaagatgttgcagattactactgtttgcaaagtgataacatgccattcacgttcggctcggggacaaagttggaaataaar

SEQ ID NO: 109 - protein, 107 aa, Mus musculus
ETTVTQSPASLSVTTGEKVTIRCITTPDIDDDMNWYQQKPGEPPNLLISEGNSLRPGVPSRFSSSGYGTNFVFTIENTLSEDVADYYCLQSDNMPFTFGSGTKLEIK

SEQ ID NO: 110 - DNA, 354 bp, Mus musculus
  misc_feature (1)..(354): SC16.35 VH
  misc_feature (354)..(354): The 'n' at position 354 may be a or g or c or t
  CDS (1)..(354)
caggtccagctgcagcagtctggggctgaactggcaaaacctggggcctcagtgaagatgtcctgcaaggcttctggctacacctttactacctactggatgcactgggtaaaacagaggcctggacagggtctggaatggattggatacattaatcctagcagtggttatactgagtacaatcagaagttcaaggacaaggccacattgactgcagacaaatcctccagcacagcctacatgcaactaagcagcctgacatctgaggactcttcagtctattactgtgcaagaaagggtagtaacagggggtttgcttactggggccaagggactctggtcactgtctcttcn

SEQ ID NO: 111 - protein, 118 aa, Mus musculus
  misc_feature (118)..(118): The 'Xaa' at location 118 stands for Ser.
QVQLQQSGAELAKPGASVKMSCKASGYTFTTYWMHWVKQRPGQGLEWIGYINPSSGYTEYNQKFKDKATLTADKSSSTAYMQLSSLTSEDSSVYYCARKGSNRGFAYWGQGTLVTVSX

SEQ ID NO: 112 - DNA, 312 bp, Mus musculus
  misc_feature (1)..(312): SC16.38 VL
  CDS (1)..(312)
caaattgttctcacccagtctccagcaatcatgtctgcatctccaggggagaaggtcaccatgacctgcagtgccagctcaagtataaattacatgcactggtaccagcagaagccaggcacctcccccaaaagatggatttatgacacatccaaactggcttctggagtccctgctcgcttcagtggcagtgggtctgggacctcttattctctcacaatcagcagcatggaggctgaagatgctgccacttattactgccatcagcggagtacgtggacgttcggtggaggcaccaagctggaaatcaaa

SEQ ID NO: 113 - protein, 104 aa, Mus musculus
QIVLTQSPAIMSASPGEKVTMTCSASSSINYMHWYQQKPGTSPKRWIYDTSKLASGVPARFSGSGSGTSYSLTISSMEAEDAATYYCHQRSTWTFGGGTKLEIK

SEQ ID NO: 114 - DNA, 348 bp, Mus musculus
  misc_feature (1)..(348): SC16.38 VH
  CDS (1)..(348)
gaggttcagctgcagcagtctggggcagagcttgtgaagccaggggcctcagtcaagttgtcctgcacagtttctggcttcaacattaaagacacctatatacactgggtgaagcagaggcctgaacagggcctggagtggattggaaggattgatcctgcgaatggtaatactaaatatgacccgaagttccagggcaaggccactataacagcagacacatcctccaacacagcctacctgcagctcagcagcctgacatctgaggacactgccgtctattactgtgctagaccgacggggtactttgaatactggggccaaggcaccactctcacagtctcctca

SEQ ID NO: 115 - protein, 116 aa, Mus musculus
EVQLQQSGAELVKPGASVKLSCTVSGFNIKDTYIHWVKQRPEQGLEWIGRIDPANGNTKYDPKFQGKATITADTSSNTAYLQLSSLTSEDTAVYYCARPTGYFEYWGQGTTLTVSS

SEQ ID NO: 116 - DNA, 321 bp, Mus musculus
  misc_feature (1)..(321): SC16.41 VL
  CDS (1)..(321)
gatatccagatgacacagactacatcctccctgtctgcctctttgggagacagagtcaccatcagttgcagggcaagtcaggatgttatcaattatttaaactggtatcagcagaaaccagatggaactgttaaactcctgatctactacacatcaaggttacactcaggagtcccatcaaggttcagtggcagtgggtctaggacagattattctctcaccatcagcaacctggaacctgaagatattgccacttactattgtcagcagtatagtgagcgtccgtacacgttcggaggggggaccaagctggaaataaaa

SEQ ID NO: 117 - protein, 107 aa, Mus musculus
DIQMTQTTSSLSASLGDRVTISCRASQDVINYLNWYQQKPDGTVKLLIYYTSRLHSGVPSRFSGSGSRTDYSLTISNLEPEDIATYYCQQYSERPYTFGGGTKLEIK

SEQ ID NO: 118 - DNA, 351 bp, Mus musculus
  misc_feature (1)..(351): SC16.41 VH
  CDS (1)..(351)
gaagtgaagcttgaggagtctggaggaggcttggtgcaatttggaggatccatgaaactctcttgtgctgcttctggattcacttttagtgatgcctggatggactgggtccgccagtctccagagaaggggcttgagtgggttgctgaaattagaaacaaagctaataatcatgcaacatattatcctgagtctgtgaaagggaggttcaccatctcaagagatgattccaaaagtagagtgtacctgcaaatgaacaacttaagagctgaagacactggcatttattactgtacgggttactcctcgtttgcttactggggccaagggactctggtcactgtctctgca

SEQ ID NO: 119 - protein, 117 aa, Mus musculus
EVKLEESGGGLVQFGGSMKLSCAASGFTFSDAWMDWVRQSPEKGLEWVAEIRNKANNHATYYPESVKGRFTISRDDSKSRVYLQMNNLRAEDTGIYYCTGYSSFAYWGQGTLVTVSA

SEQ ID NO: 120 - DNA, 336 bp, Mus musculus
  misc_feature (1)..(336): SC16.42 VL
  CDS (1)..(336)
gatgttttgatgacacagtctccactctccctgtctgtcagtcttggagatcaagcctccatctcttgtagatctagtcagaacattgtacacagtgatagatacacctatttagaatggtacctgcagaaaccaggccagtcgccaaaactcctgatatatggggtttccaaccgattttctggggtcccagacaggttcagtggcagtggatcagggacagatttcacactcaagatcagcagagtggaggctgaggatatgggagtttattactgctttcaaggtacacatgttccgtacacgttcggaggggggaccaagctggaaataaaa

SEQ ID NO: 121 - protein, 112 aa, Mus musculus
DVLMTQSPLSLSVSLGDQASISCRSSQNIVHSDRYTYLEWYLQKPGQSPKLLIYGVSNRFSGVPDRFSGSGSGTDFTLKISRVEAEDMGVYYCFQGTHVPYTFGGGTKLEIK

SEQ ID NO: 122 - DNA, 354 bp, Mus musculus
  misc_feature (1)..(354): SC16.42 VH
  CDS (1)..(354)
cagatccagttggtgcagtctggacctgaactgaagaagcctggagagacagtcaagatctcctgcaaggcttctgggtataccttcacaactgctggaatgcagtgggtgcaaaagatgccaggaaagggttttaagtggattggctggataaacacccactctggagagccaaaatatgcagatgacttcaagggacggtttgccttctctttggaaacctctgccagcactgcctatttacagataagcaacctcaaagacgaggacacggctacgtttttctgtgcgcccctatggtccgatagtagttttgcttactggggccaaggaactctggtcactgtctctgca

SEQ ID NO: 123 - protein, 118 aa, Mus musculus
QIQLVQSGPELKKPGETVKISCKASGYTFTTAGMQWVQKMPGKGFKWIGWINTHSGEPKYADDFKGRFAFSLETSASTAYLQISNLKDEDTATFFCAPLWSDSSFAYWGQGTLVTVSA

SEQ ID NO: 124 - DNA, 321 bp, Mus musculus
  misc_feature (1)..(321): SC16.45 VL
  CDS (1)..(321)
gaaatccagatgacccagtctccatcctctatgtctgcatctctgggagacagaataaccatcacttgccaggcaactcaagacattgttaagaatttaaactggtatcagcagaaaccagggaaacccccttcattcctgatctattatgcaactgaactggcagaaggggtcccagcaaggttcagtggcagtgggtctgggtcagactattctctgacaatcagcaacctggagtctgaagattttgcagactatcactgtctacagttttatgagtttccgttcacgttcggtgctgggaccaagctggagctgaaa

SEQ ID NO: 125 - protein, 107 aa, Mus musculus
EIQMTQSPSSMSASLGDRITITCQATQDIVKNLNWYQQKPGKPPSFLIYYATELAEGVPARFSGSGSGSDYSLTISNLESEDFADYHCLQFYEFPFTFGAGTKLELK

SEQ ID NO: 126 - DNA, 363 bp, Mus musculus
  misc_feature (1)..(363): SC16.45 VH
  CDS (1)..(363)
caggtccagctgcagcagtctggagctgacctggtaaggcctgggacttcagtgaaggtgtcctgcaaggcttctggatactccttcactaattacctgatagagtgggtaaagcagaggccaggacagggccttgagtggattggagtgattaatcctggaagtggtggaactcactacaatgagaaattcaaggacaaggcagttctgactgcagacaaatcctccactactgcccacatgcagctcagcagcctgacatctgatgactctgcggtctatttctgtgcaagatccccctatgattataacgatggtgctatggactactggggtcaaggaacctcagtcaccgtctcttca

SEQ ID NO: 127 - protein, 121 aa, Mus musculus
QVQLQQSGADLVRPGTSVKVSCKASGYSFTNYLIEWVKQRPGQGLEWIGVINPGSGGTHYNEKFKDKAVLTADKSSTTAHMQLSSLTSDDSAVYFCARSPYDYNDGAMDYWGQGTSVTVSS

SEQ ID NO: 128 - DNA, 336 bp, Mus musculus
  misc_feature (1)..(336): SC16.47 VL
  CDS (1)..(336)
gatgttgttctgacccagtctccactctctctgcctgtcaatattggagatcaagcctctatctcttgcaagtctactaagagtcttctgaatagtgatggattcacttatttggactggtatttgcagaggccaggccagtctccacaattcctaatatatttggtttctaatcgattttctggagttccagacaggttcagtggcagtgggtcaggaacagatttcacactcaagatcagcagagtggaggctgaggatttgggagtatattattgcttccagagtaactatcttccgctcacgttcggtgctgggaccaagctggagctgaga

SEQ ID NO: 129 - protein, 112 aa, Mus musculus
DVVLTQSPLSLPVNIGDQASISCKSTKSLLNSDGFTYLDWYLQRPGQSPQFLIYLVSNRFSGVPDRFSGSGSGTDFTLKISRVEAEDLGVYYCFQSNYLPLTFGAGTKLELR

SEQ ID NO: 130 - DNA, 357 bp, Mus musculus
  misc_feature (1)..(357): SC16.47 VH
  CDS (1)..(357)
gaggtccaactgcagcagtctggacctgagctggtgaagcctggggcttcagtgaagatatcctgcaaggcttctggttactcattcagtcgtttctatatgcactgggtgaagcaaagtcctgaaaatagtcttgagtggattggagagattaatcctagcactgggggtacaagctacaaccagaagttcaagggcaaggccacattaactgtagataaatcctccagcacagcctacatgcagctcaagagcctgacatctgaagagtctgcagtctattactgtactaggggttacgggagcaactgttacttcgatgtctggggcgcagggaccacggtcaccgtctccaca

SEQ ID NO: 131 - protein, 119 aa, Mus musculus
EVQLQQSGPELVKPGASVKISCKASGYSFSRFYMHWVKQSPENSLEWIGEINPSTGGTSYNQKFKGKATLTVDKSSSTAYMQLKSLTSEESAVYYCTRGYGSNCYFDVWGAGTTVTVST

SEQ ID NO: 132 - DNA, 321 bp, Mus musculus
  misc_feature (1)..(321): SC16.49 VL
  CDS (1)..(321)
gacatcaagatgacccagtctccatcttccatgtatgcatctctaggagagagagtcactatcacttgcaaggcgagtcaggacattaatagttatttaagctggttccagcagaaaccagggaaatctcctaagaccctgatctatcgagcaaacagattggtagatggggtcccatcaaggttcagtggcagtggatctgggcaagattattctctcaccatcaccagcctggagtatgaagatatgggaatttattattgtctacagtatgatgaatttccgctcacgttcggtgctgggaccaagctggagctgaaa

SEQ ID NO: 133 - protein, 107 aa, Mus musculus
DIKMTQSPSSMYASLGERVTITCKASQDINSYLSWFQQKPGKSPKTLIYRANRLVDGVPSRFSGSGSGQDYSLTITSLEYEDMGIYYCLQYDEFPLTFGAGTKLELK

SEQ ID NO: 134 - DNA, 351 bp, Mus musculus
  misc_feature (1)..(351): SC16.49 VH
  CDS (1)..(351)
caggttcaactgcagcagtctggacctgagctggtgaagcctgggactttagtgaagatatcctgcaaggcttctggttacaccttcacaagctacgatataaactgggtgaagcagaggcctggacagggacttgaatggattggatggatttatcctggagatggtaatactaagtacagtgagaaattcaagggcaaggccacactgactgcagacaaatcctccagcacagcctacatgcagctcaccagcctgacttctgagaactctgcagtctatttctgtgcaagagactatgattacccttttgcttactggggccaagggactctggtcactgtctctgca

SEQ ID NO: 135 - protein, 117 aa, Mus musculus
QVQLQQSGPELVKPGTLVKISCKASGYTFTSYDINWVKQRPGQGLEWIGWIYPGDGNTKYSEKFKGKATLTADKSSSTAYMQLTSLTSENSAVYFCARDYDYPFAYWGQGTLVTVSA

SEQ ID NO: 136 - DNA, 318 bp, Mus musculus
  misc_feature (1)..(318): SC16.50 VL
  CDS (1)..(318)
gatatccagatgacacagactacatcctccctgtctgcctctctgggagacagagtcaccatcagttgcagggcaagtcaggacattagcaattatttaaactggtatcagcagaaaccagatggaactgttaaactcctgatctactacacatcaagattacactcaggagtcccatcaaggttcagtggcagtgggtctggtacagattattctctcaccattagcaacctggagcaagaagatattgccacttacttttgccaacagggtaatacgcttcggacgttcggtggaggcaccaagctggaaatcaaa

SEQ ID NO: 137 - protein, 106 aa, Mus musculus
DIQMTQTTSSLSASLGDRVTISCRASQDISNYLNWYQQKPDGTVKLLIYYTSRLHSGVPSRFSGSGSGTDYSLTISNLEQEDIATYFCQQGNTLRTFGGGTKLEIK

SEQ ID NO: 138 - DNA, 363 bp, Mus musculus
  misc_feature (1)..(363): SC16.50 VH
  CDS (1)..(363)
gaagtgcagctggtggagtgtgggggatgcttagtgaagcctggagggtacctgaaactctcctgtgcagcctctggattcactttcagtagctatgccatgtcttgggttcgccagtctccagagaagaggctggagtgggtcgcagaaatcagtattggtggtagctacacctactatccagacactgtgacgggccgattcaccatctccagagacaatgccaagaacaccctgtacctggaaatgagcagtctgaggtctgaggacacggccatgtattactgtgcaagggagggctatgattacgacgtgagagctatggactactggggtcaaggaacctcagtcaccgtctcctca

SEQ ID NO: 139 - protein, 121 aa, Mus musculus
EVQLVECGGCLVKPGGYLKLSCAASGFTFSSYAMSWVRQSPEKRLEWVAEISIGGSYTYYPDTVTGRFTISRDNAKNTLYLEMSSLRSEDTAMYYCAREGYDYDVRAMDYWGQGTSVTVSS

SEQ ID NO: 140 - DNA, 321 bp, Mus musculus
  misc_feature (1)..(321): SC16.52 VL
  CDS (1)..(321)
gacatccagatgattcagtctccatcgtccatgtttgcctctctgggagacagagtcagtctctcttgtcgggctagtcagggcattagagggactttagactggtatcaacagaaaccaaatggaactattaaactcctgatctactccacatccaatttaaattctggtgtcccatcaaggttcagtggcagtgggtctgggtcagattattctctcaccatcagcagcctagagtctgaagattttgcagactattactgtctacagcgtaatgcgtatcctctcacgttcggtgctgggaccaagctggagctgaaa

SEQ ID NO: 141 - protein, 107 aa, Mus musculus
DIQMIQSPSSMFASLGDRVSLSCRASQGIRGTLDWYQQKPNGTIKLLIYSTSNLNSGVPSRFSGSGSGSDYSLTISSLESEDFADYYCLQRNAYPLTFGAGTKLELK

SEQ ID NO: 142 - DNA, 357 bp, Mus musculus
  misc_feature (1)..(357): SC16.52 VH
  CDS (1)..(357)
caggtgcagctgaaggagtcaggacctggcctggtggcgccctcacagagcctgtccatcacgtgcgctgtctctggattttcattaaccagctttgcaatacactggtttcgcaagcctccaggaaagggtctggagtggctgggagtaatatggactggtggaaccacaaattataattcggctctcatgtccagactgagcatcagcaaagacaactccaagagccaagttttcttaaaaatgaacagtctgcaaactgatgacacagccatgtactactgtgccagagacgattacgacaataattatgctatggactactggggtcaaggaacctcagtcaccgtctcctca

SEQ ID NO: 143 - protein, 119 aa, Mus musculus
QVQLKESGPGLVAPSQSLSITCAVSGFSLTSFAIHWFRKPPGKGLEWLGVIWTGGTTNYNSALMSRLSISKDNSKSQVFLKMNSLQTDDTAMYYCARDDYDNNYAMDYWGQGTSVTVSS

SEQ ID NO: 144 - DNA, 321 bp, Mus musculus
  misc_feature (1)..(321): SC16.55 VL
  CDS (1)..(321)
gacatcaagatgacccagtctccatcttccatgtatgcatctctaggagagagagtcactatcacttgcaaggcgagtcaggacattaatagctatttaaactggttccagcagaaaccagggaaatctcctaagaccctgatctatcgtgcaaacagattggtagatggggtcccatcaaggttcagtggcagtggatctgggcaagattattctctcaccatcagcagcctggagtatgaagatatgggaatttattattgtctacagtatgatgagtttccgtacacgttcggaggggggaccaagctggaaataaaa

SEQ ID NO: 145 - protein, 107 aa, Mus musculus
DIKMTQSPSSMYASLGERVTITCKASQDINSYLNWFQQKPGKSPKTLIYRANRLVDGVPSRFSGSGSGQDYSLTISSLEYEDMGIYYCLQYDEFPYTFGGGTKLEIK

SEQ ID NO: 146 - DNA, 351 bp, Mus musculus
  misc_feature (1)..(351): SC16.55 VH
  CDS (1)..(351)
gaggtgcagcttgttgagtctggtggaggattggtgcagcctaaagggtcattgaaactctcatgtgcagtctctgcattcaccttcactacctacgccatgaactgggtccgccaggctccaggaaagggtttggagtgggttgctcgcataagaaataaaagtaataattatgcaacatattatgccgattcagtgaaagacaggttcaccatctccagagatgattcacaaagcatgctctatctgcaaatgaacaacttgaaaattgaggacacagccatgtattactgtgtgttctactatgattacgtctactggggccaagggactctggtcactgtctctgca

SEQ ID NO: 147 - protein, 117 aa, Mus musculus
EVQLVESGGGLVQPKGSLKLSCAVSAFTFTTYAMNWVRQAPGKGLEWVARIRNKSNNYATYYADSVKDRFTISRDDSQSMLYLQMNNLKIEDTAMYYCVFYYDYVYWGQGTLVTVSA

SEQ ID NO: 148 - DNA, 321 bp, Mus musculus
  misc_feature (1)..(321): SC16.56 VL
  CDS (1)..(321)
agtattgtgatgacccagactcccaaattcctgcttgtatcagcaggagacagggttaccataacctgcaaggccagtcagagtgtgagtaatgatgtagtatggtaccaacagaagccagggcagtctcctaaactgctgatatactatgcatccaatcgctacactggagtccctgatcgcttcgctggcagtggatatgggacggatttctctttcaccatcagcactgtgcaggctgaagacctggcagtttatttctgtcagcaggattatacctctccgtggacgttcggtggaggcaccaagctggaaatcaga

SEQ ID NO: 149 - protein, 107 aa, Mus musculus
SIVMTQTPKFLLVSAGDRVTITCKASQSVSNDVVWYQQKPGQSPKLLIYYASNRYTGVPDRFAGSGYGTDFSFTISTVQAEDLAVYFCQQDYTSPWTFGGGTKLEIR

SEQ ID NO: 150 - DNA, 354 bp, Mus musculus
  misc_feature (1)..(354): SC16.56 VH
  CDS (1)..(354)
cagatccagttggtgcagtctggacctgaactgaagaagcctggagagacagtcaagatctcctgcaaggcttctgggtataccttcacaaactatggaatgaactgggtgaagcaggctccaggaaagggtttaaagtggatggcctggataaacacctacactggagagccaacatatgctgatgacttcaagggacggtttgccttctctttggaaacctctgccagcactgcctctttgcagatcatcaacctcaaaaatgaggacacggctacatatttctgtgcaaggatcggcgatagtagtccctctgactactgggggcagggcaccactctcacagtctcctca

SEQ ID NO: 151 - protein, 118 aa, Mus musculus
QIQLVQSGPELKKPGETVKISCKASGYTFTNYGMNWVKQAPGKGLKWMAWINTYTGEPTYADDFKGRFAFSLETSASTASLQIINLKNEDTATYFCARIGDSSPSDYWGQGTTLTVSS

SEQ ID NO: 152 - DNA, 321 bp, Mus musculus
  misc_feature (1)..(321): SC16.57 VL
  CDS (1)..(321)
gacattgtgatgacccagtctcacaaattcatgtccatatcagtaggagacagggtcagcatcacctgcaaggccagtcaggatgtgagtatttttgtagcctggtatcaacagaaaccaggacaatctcctaaactactgatttactcggcatcctaccggtacactggagtccctgatcgcttcactggcagtggatctgggacggatttcattttcaccatcagcagtgtgcaggctgaagacctggcagtttactactgtcagcaacattatggtactccattcacgttcggctcggggacaaagttgaaaataaga

SEQ ID NO: 153 - protein, 107 aa, Mus musculus
DIVMTQSHKFMSISVGDRVSITCKASQDVSIFVAWYQQKPGQSPKLLIYSASYRYTGVPDRFTGSGSGTDFIFTISSVQAEDLAVYYCQQHYGTPFTFGSGTKLKIR

SEQ ID NO: 154 - DNA, 354 bp, Mus musculus
  misc_feature (1)..(354): SC16.57 VH
  CDS (1)..(354)
gaagtgaaactggtggagtctgggggagacttagtgaagcctggagggtccctaaaactctcctgtgcagcctctggattcgctttcagtagttatgacatgtcttgggttcgccagactccggagaagagactggagtgggtcgcaaccattagcagtggtggtagttacacctattatccagacagtgtgaagggccgattcaccatctccagagacaatgtcagggacaccctgtacctgcaaatgagcagtttgaggtctgaggacacggccttgtattactgtgcaagacaggcaattgggacgtactttgactactggggccaaggcaccactctcacagtctcctca

SEQ ID NO: 155 - protein, 118 aa, Mus musculus
EVKLVESGGDLVKPGGSLKLSCAASGFAFSSYDMSWVRQTPEKRLEWVATISSGGSYTYYPDSVKGRFTISRDNVRDTLYLQMSSLRSEDTALYYCARQAIGTYFDYWGQGTTLTVSS

SEQ ID NO: 156 - DNA, 321 bp, Mus musculus
  misc_feature (1)..(321): SC16.58 VL
  CDS (1)..(321)
gacatccagatgactcagtctccagcctccctatcttcatctgtgggagaaactgtcaccatcacatgtcgagcaagtgagaatatttacagttatttagcatggtatcagcagaaacagggaaaatctcctcagctcctggtctataatgcaaaaactttagcagaaggtgtgccatcaaggttcagtggcagtggatcaggcacacagttttctctgaagatcaacagcctgcagcctgaagattttgggacttattactgtcaacatcattatgattctccgctcacgttcggtgctgggaccaagctggagctgaga

SEQ ID NO: 157 - protein, 107 aa, Mus musculus
DIQMTQSPASLSSSVGETVTITCRASENIYSYLAWYQQKQGKSPQLLVYNAKTLAEGVPSRFSGSGSGTQFSLKINSLQPEDFGTYYCQHHYDSPLTFGAGTKLELR

SEQ ID NO: 158 - DNA, 360 bp, Mus musculus
  misc_feature (1)..(360): SC16.58 VH
  CDS (1)..(360)
gatgtgcagctggtggagtctgggggaggcttagtgcagcctggagggtcccggaaactctcctgtgcagcctctggattcactttcagtagctttggaatgcactgggttcgtcaggctccagagaaggggctggagtgggtcgcatacattagtagtggcagtagtaacatctactatgcagacacagtgaagggccgattcaccatctccagagacaatcccaagaacaccctgttcctgcaaatgaccagtctaaggtctgaggacacggccatgtattactgtgcaagaggctactatggtaactacgatgctatggactactggggtcaaggaacctcagtcaccgtctcctca

SEQ ID NO: 159 - protein, 120 aa, Mus musculus
DVQLVESGGGLVQPGGSRKLSCAASGFTFSSFGMHWVRQAPEKGLEWVAYISSGSSNIYYADTVKGRFTISRDNPKNTLFLQMTSLRSEDTAMYYCARGYYGNYDAMDYWGQGTSVTVSS

SEQ ID NO: 160 - DNA, 339 bp, Mus musculus
  misc_feature (1)..(339): SC16.61 VL
  CDS (1)..(339)
gatattgtgatgacacagtctacatcctccctggctatgtcagtaggacagaaggtcactatgagctgcaagtccagtcagagccttttaaatagtagcaatcaaaagaattatttggcctggtaccagcaggaaccaggacagtctcctaaacttctggtatcctttgcatccactagggaatctggggtccctgatcgcttcacaggcagtggatctgggacagatttcactcttaccatcagcggtgtgcaggctgaagacctggcagtttattactgtcagcaacattatagcattccgctcacgttcggtgctggaaccaagctggagctgaaa

SEQ ID NO: 161 - protein, 113 aa, Mus musculus
DIVMTQSTSSLAMSVGQKVTMSCKSSQSLLNSSNQKNYLAWYQQEPGQSPKLLVSFASTRESGVPDRFTGSGSGTDFTLTISGVQAEDLAVYYCQQHYSIPLTFGAGTKLELK

SEQ ID NO: 162 - DNA, 360 bp, Mus musculus
  misc_feature (1)..(360): SC16.61 VH
  CDS (1)..(360)
gaggtcctgctccaacggtctggacctgacctggtgaagcctggggcttcagtgacgataccctgcaaggcttctggatacacattcactgactacaacatggactgggtgaagcagagccatggaaagagccttgagtggattggaaatattaatacttacaatggtggtactatctacaaccagaagttcaagggcaaggccacattgactgtagacaagccctccagcacagcctacatggagctccgcagcctgacatctgaggacactgcagtctattactgtgcaagacgtctacggtatgggggacactactttgactactggggccaaggcaccgctctcacagtctcctca

SEQ ID NO: 163 - protein, 120 aa, Mus musculus
EVLLQRSGPDLVKPGASVTIPCKASGYTFTDYNMDWVKQSHGKSLEWIGNINTYNGGTIYNQKFKGKATLTVDKPSSTAYMELRSLTSEDTAVYYCARRLRYGGHYFDYWGQGTALTVSS

SEQ ID NO: 164 - DNA, 321 bp, Mus musculus
  misc_feature (1)..(321): SC16.62 VL
  CDS (1)..(321)
gacatcaagatgacccagtctccatcttccatgtatgcatctctaggagagagagtcactatcacttgcaaggcgagtcaggacattaatagctttttaagctggttccagcggaaaccagggaaatctccgaagaccctgatctatcgtgcaaacagattagtagatggagtcccatcaaggttcactggcagtggatctgggcaagaattttctctcaccatcagcagcctggagtatgaagatttgggaatttattattgtcttcagtatgatgagtttccgtacacgttcggaggggggaccaagctggaaataaaa

SEQ ID NO: 165 - protein, 107 aa, Mus musculus
DIKMTQSPSSMYASLGERVTITCKASQDINSFLSWFQRKPGKSPKTLIYRANRLVDGVPSRFTGSGSGQEFSLTISSLEYEDLGIYYCLQYDEFPYTFGGGTKLEIK

SEQ ID NO: 166 - DNA, 351 bp, Mus musculus
  misc_feature (1)..(351): SC16.62 VH
  CDS (1)..(351)
gaagtgatgctggtagagtctgggggagacttagtgaagcctggagggtccctgaaactctcctgtgcagcctctggattcactttcagtagctatgccatgtcttgggttcgccagactccggagaagaggctggagtgggtcgcatacattagcggtggtggtgatcacatctattatccagacagtgtgaggggccgattcaccatctccagagacaatgccaaggacaccctgtacctgcaaatgagcagtctgaggtctgaggacacggccttgtatgactgtgcaagagtgagagactggtacttcgatgtctggggcgcagggaccacggtcaccgtctcctca

SEQ ID NO: 167 - protein, 117 aa, Mus musculus
EVMLVESGGDLVKPGGSLKLSCAASGFTFSSYAMSWVRQTPEKRLEWVAYISGGGDHIYYPDSVRGRFTISRDNAKDTLYLQMSSLRSEDTALYDCARVRDWYFDVWGAGTTVTVSS

SEQ ID NO: 168 - DNA, 318 bp, Mus musculus
  misc_feature (1)..(318): SC16.63 VL
  CDS (1)..(318)
caaattgttctcacccagtctccagcaatcatgtctgcatctccaggggagaaggtcaccatgacctgcagtgccagctcaagtgtcagttacatgtactggtaccagcagaagtcaggcacctcccccaaaagatggatttatgacacatccaaactggcttctggagtccctgctcgcttcagtggcagtgggtctgggacctcttactctctcacaatcagcagcatggaggctgaagatgctgccacttattactgccagcagtggagtagtaacccgtacacgttcggaggggggaccaagctggaaataaar

SEQ ID NO: 169 - protein, 106 aa, Mus musculus
QIVLTQSPAIMSASPGEKVTMTCSASSSVSYMYWYQQKSGTSPKRWIYDTSKLASGVPARFSGSGSGTSYSLTISSMEAEDAATYYCQQWSSNPYTFGGGTKLEIK

SEQ ID NO: 170 - DNA, 342 bp, Mus musculus
  misc_feature (1)..(342): SC16.63 VH
  CDS (1)..(342)
caggttcagctgcagcagtctggaactgagctgctgaggcctggggcctcagtgaagatatcctgcaaggctactggctacacattcagtagctactggatggagtgggtaaagcagaggcctggacatggccttgagtggattggagagattttacctggaagtggtactactcagtacaatgagaagttcaagggcaaggccaccttcactgcagatacatcctccaacacagcctacatgcatctcagcagcctgacatctgaggactctgccgtctattactgtgcaagagggactaactctctctggggccaagggactctggtcactgtctctgca

SEQ ID NO: 171 - protein, 114 aa, Mus musculus
QVQLQQSGTELLRPGASVKISCKATGYTFSSYWMEWVKQRPGHGLEWIGEILPGSGTTQYNEKFKGKATFTADTSSNTAYMHLSSLTSEDSAVYYCARGTNSLWGQGTLVTVSA

SEQ ID NO: 172 - DNA, 318 bp, Mus musculus
  misc_feature (1)..(318): SC16.65 VL
  CDS (1)..(318)
caaattgttctcacccagtctccagcactcatgtctgcatctccaggggagaaggtcaccatgacctgcagtgtcacctcaagtgtaagttacatgtactggtaccagcagaagcctagatcctcccccaaaccctggatttatctcacatccaacctggcttctggagtccctgctcgcttcagtggcagtgggtctgggacctcttactctctcacaatcagcagcgtggaggctgaagatgctgccacttattactgccagcagtggaggaataacccattcacgttcggctcggggacaaaggtggaaataaaa

SEQ ID NO: 173 - protein, 106 aa, Mus musculus
QIVLTQSPALMSASPGEKVTMTCSVTSSVSYMYWYQQKPRSSPKPWIYLTSNLASGVPARFSGSGSGTSYSLTISSVEAEDAATYYCQQWRNNPFTFGSGTKVEIK

SEQ ID NO: 174 - DNA, 372 bp, Mus musculus
  misc_feature (1)..(372): SC16.65 VH
  CDS (1)..(372)
caggttactctgaaagagtctggccctgggatattgcagccctcccagaccctcagtctgacttgttctttctctgggttttcactgagcacttctggtatgggtgtaggctggattcgtcagccatcagggaagggtctggagtggctggcactcatttggtgggatgatgtcaagcgctataatccagccctgaagagtcgactgactatctccaaggatgcctccagcagccaggtcttcctcaagatcgccagtgtggacactgcagatactgccacatactactgtgctcgaatagcttcctatgattacgacgtagtctatgctatggactactggggtcaaggaacctcagtcagcgtctcctca

SEQ ID NO: 175 - protein, 124 aa, Mus musculus
QVTLKESGPGILQPSQTLSLTCSFSGFSLSTSGMGVGWIRQPSGKGLEWLALIWWDDVKRYNPALKSRLTISKDASSSQVFLKIASVDTADTATYYCARIASYDYDVVYAMDYWGQGTSVSVSS

SEQ ID NO: 176 - DNA, 327 bp, Mus musculus
  misc_feature (1)..(327): SC16.67 VL
  CDS (1)..(327)
caggctgttgtgactcaggaatctgcactcaccacatcacctggtgaaacagtcacactcacttgtcgctcaagtactggggctgttacaactagtaactatgccaactggatccaagaaaaaccagatcatttattcactggtctaataggtggtaccaacaaccgagctccaggtgttcctgccagattctcaggctccctgattggagacaaggctgccctcaccatcacaggggcacagactgaggatgaggcaatatatttctgtggtctatggtacagcaaccatttggtgttcggtggaggaaccaaactgactgtccta

SEQ ID NO: 177 - protein, 109 aa, Mus musculus
QAVVTQESALTTSPGETVTLTCRSSTGAVTTSNYANWIQEKPDHLFTGLIGGTNNRAPGVPARFSGSLIGDKAALTITGAQTEDEAIYFCGLWYSNHLVFGGGTKLTVL

SEQ ID NO: 178 - DNA, 351 bp, Mus musculus
  misc_feature (1)..(351): SC16.67 VH
  CDS (1)..(351)
gaggtgcagcttgttgagactggtggaggattggtgcagcctaaagggtcattgaaactctcatgtgcagtctctgcattcaccttcactacctacgccatgaactgggtccgccaggctccaggaaagggtttggagtgggttgctcgcataagaaataaaagtaataattatgcaacatattatgccgattcagtgaaagacaggttcaccatctccagagatgattcacaaagcatgctctatctgcaaatgaacaacttgaaaattgaggacacagccatgtattactgtgtgttctactatgattacgtctactggggccaagggactctggtcactgtctctgca

SEQ ID NO: 179 - protein, 117 aa, Mus musculus
EVQLVETGGGLVQPKGSLKLSCAVSAFTFTTYAMNWVRQAPGKGLEWVARIRNKSNNYATYYADSVKDRFTISRDDSQSMLYLQMNNLKIEDTAMYYCVFYYDYVYWGQGTLVTVSA

SEQ ID NO: 180 - DNA, 321 bp, Mus musculus
  misc_feature (1)..(321): SC16.68 VL
  CDS (1)..(321)
gaaacaactgtgacccagtctccagcattcctgtccgtggctacaggagaaaaagtcactatcagatgcataaccagcactgatattgatgatgatatgaactggtaccagcagaagccaggggaacctcctaatgtccttatttcagaaggcaatactcttcgtcctggagtcccatcccgattctccagcagtggctatggcacagattttgtttttacaattgaaaacacgctctcagaagatgttgcagattactactgtttgcaaagtgataacatgcctctcacgttcggtgctgggaccaagctggagctgaaa

SEQ ID NO: 181 - protein, 107 aa, Mus musculus
ETTVTQSPAFLSVATGEKVTIRCITSTDIDDDMNWYQQKPGEPPNVLISEGNTLRPGVPSRFSSSGYGTDFVFTIENTLSEDVADYYCLQSDNMPLTFGAGTKLELK

SEQ ID NO: 182 - DNA, 363 bp, Mus musculus
  misc_feature (1)..(363): SC16.68 VH
  CDS (1)..(363)
caggtgcaactgcagcagcctggggctgagctggtgaagcctggggcctcagtgaagatgtcctgcaaggcttctggctacacatttaccaattacaatatgcactgggtaaagcagacacctggacagggcctggaatggattggggctatttttccaggaaatggtggtacttcctacaatcagaagttcaaaggcaaggccacattgactgcagacaaatcctccagcacagcctacatgcagctcaccagtttgacatctggggactctgcagtctattactgtgcaagatggggctacggtagtggcctttatgctatggactactggggtcaaggaacctcagtcaccgtctcctca

SEQ ID NO: 183 - protein, 121 aa, Mus musculus
QVQLQQPGAELVKPGASVKMSCKASGYTFTNYNMHWVKQTPGQGLEWIGAIFPGNGGTSYNQKFKGKATLTADKSSSTAYMQLTSLTSGDSAVYYCARWGYGSGLYAMDYWGQGTSVTVSS

SEQ ID NO: 184 - DNA, 318 bp, Mus musculus
  misc_feature (1)..(318): SC16.72 VL
  CDS (1)..(318)
gaaaatgtactcacccagtctccagcaatcatgtctgcatctctaggggagaaggtcaccatgagctgcagggccagctcaagtgtaaattacatgtcctggtaccagcagaagtcagatgcctcccccaaactatggatttattacacatccaacctggctcctggagtcccagctcgcttcagtggcagtgggtctgggaactcttattctctcacaatcagcagcatggagggtgaagatgctgccacttattactgccagcagtttactagttccccgtacacgttcggaggggggaccaagctggaaataaaa

SEQ ID NO: 185 - protein, 106 aa, Mus musculus
ENVLTQSPAIMSASLGEKVTMSCRASSSVNYMSWYQQKSDASPKLWIYYTSNLAPGVPARFSGSGSGNSYSLTISSMEGEDAATYYCQQFTSSPYTFGGGTKLEIK

SEQ ID NO: 186 - DNA, 351 bp, Mus musculus
  misc_feature (1)..(351): SC16.72 VH
  CDS (1)..(351)
gaggtccagctgcagcagtctggacctgagctggtaaagcctggggcttcagtgaagatgtcctgcaaggcttctggatacacattcactagctatgttatgcactgggtgaagcagaagcctgggcagggccttgagtggattggatatattaatccttacaatgatggtactaagtacaatgagaagttcaaaggcaaggccacactgacttcagacaaatcctccagcacagcctacatggagctcagcagcctgacctctgaggactctgcggtctattactgtgcaagattgaggtcgagggctatggactactggggtcaaggaacctcagtcaccgtctcctca

SEQ ID NO: 187 - protein, 117 aa, Mus musculus
EVQLQQSGPELVKPGASVKMSCKASGYTFTSYVMHWVKQKPGQGLEWIGYINPYNDGTKYNEKFKGKATLTSDKSSSTAYMELSSLTSEDSAVYYCARLRSRAMDYWGQGTSVTVSS

SEQ ID NO: 188 - DNA, 321 bp, Mus musculus
  misc_feature (1)..(321): SC16.73 VL
  CDS (1)..(321)
gacatccagatgacccagtctccatcctccttatctgcctctctgggagagagagtcagtctcacttgtcgggcaagtcaggacattggttatagcttaaactggcttcagcaggaaccagatggaactattaaacgcctgatctacgccacatccagtttagattctggtgtccccaaaaggttcagtggcagtaggtctgggtcagattattctctcaccatcagcagccttgagtctgaagattttgtagactattactgtctacaatatgctagttctccgtggacgttcggtggaggcaccaagctggaaatcaaa

SEQ ID NO: 189 - protein, 107 aa, Mus musculus
DIQMTQSPSSLSASLGERVSLTCRASQDIGYSLNWLQQEPDGTIKRLIYATSSLDSGVPKRFSGSRSGSDYSLTISSLESEDFVDYYCLQYASSPWTFGGGTKLEIK

SEQ ID NO: 190 - DNA, 369 bp, Mus musculus
  misc_feature (1)..(369): SC16.73 VH
  CDS (1)..(369)
caggtgcagctgcagcagtctggagctgagctgatgaagcctggggcctcagtgaagatatcctgcaaggctaatggctacacattcagtagctactggatagagtggttaaggcagaggcctggacatggccttgagtggattggagagattttacctggaagtgataatagtaattataatgagaagttcaagggcaaggccacattcactgcagatacatcctccaacacagcctacatgcaactcagcagcctgacatctgaggaatctgccgtctattactgtacaaggggattacgacgagacggctcatattactatgttatggaacattggggtcaaggaacctcagtcaccgtctcctca

SEQ ID NO: 191 - protein, 123 aa, Mus musculus
QVQLQQSGAELMKPGASVKISCKANGYTFSSYWIEWLRQRPGHGLEWIGEILPGSDNSNYNEKFKGKATFTADTSSNTAYMQLSSLTSEESAVYYCTRGLRRDGSYYYVMEHWGQGTSVTVSS

SEQ ID NO: 192 - DNA, 321 bp, Mus musculus
  misc_feature (1)..(321): SC16.78 VL
  CDS (1)..(321)
gacatcaagatgacccagtctccatcttccatgtatgcatctctaggagagagagtcactatcacttgcaaggcgagtcaggacattaatagctatttaagctggttccagcagaagccagggagatctcctaagaccctgatctatcgtgcaaacagattggtagatggggtcccatcaaggttcagtggcagtggatctgggcaagattattctctcaccatcagcagcctggactatgaagatatgggaatttattattgtctacagtatgatgaatttccattcacgttcggctcggggacaaagttggarathaar

SEQ ID NO: 193 - protein, 107 aa, Mus musculus
DIKMTQSPSSMYASLGERVTITCKASQDINSYLSWFQQKPGRSPKTLIYRANRLVDGVPSRFSGSGSGQDYSLTISSLDYEDMGIYYCLQYDEFPFTFGSGTKLEIK

SEQ ID NO: 194 - DNA, 357 bp, Mus musculus
  misc_feature (1)..(357): SC16.78 VH
  CDS (1)..(357)
gaagtgaagctggtggagtctgggggaggcttagtgaagcctggagggtccctgaaactctcctgtgcagcctctggattcactttcggtcgctatgtcatgtcttgggttcgccagactccagaaaagaaactggagtgggtcgcatccattactagtggtggtactacctactatccagacagtgtgaagggccgattcaccatctccagagataatgccaggaacatcctgtacctacaaatgagcagtctgaggtctgaggacacggccatgtattactgtgcaagagtctactatcattacgacgacatctttgcttactggggccaagggactctggtcactgtctctgca

SEQ ID NO: 195 - protein, 119 aa, Mus musculus
EVKLVESGGGLVKPGGSLKLSCAASGFTFGRYVMSWVRQTPEKKLEWVASITSGGTTYYPDSVKGRFTISRDNARNILYLQMSSLRSEDTAMYYCARVYYHYDDIFAYWGQGTLVTVSA

SEQ ID NO: 196 - DNA, 336 bp, Mus musculus
  misc_feature (1)..(336): SC16.79 VL
  CDS (1)..(336)
gacattgtgatgtcacagtctccatcctccctggctgtgtcagcaggagagaaggtcactatgagctgcaaatccagtcagagtctgctcaacagtagaacccgaaagaactacttggcttggtaccagcagaaaccagggcagtctcctaaactgctgatctactgggcatccactagggaatctggggtccctgatcgcttcacaggcagtggatctgggacagatttcactctcaccatcagcagtgtgcaggctgaagacctggcagtttattactgcaagcaatcttataatctttacacgttcggaggggggaccaagctgaaaataaaa

SEQ ID NO: 197 - protein, 112 aa, Mus musculus
DIVMSQSPSSLAVSAGEKVTMSCKSSQSLLNSRTRKNYLAWYQQKPGQSPKLLIYWASTRESGVPDRFTGSGSGTDFTLTISSVQAEDLAVYYCKQSYNLYTFGGGTKLKIK

SEQ ID NO: 198 - DNA, 348 bp, Mus musculus
  misc_feature (1)..(348): SC16.79 VH
  CDS (1)..(348)
gaggtccagctgcaacagtctggacctgagctggtgaagcctggggcttcagtgaagatatcctgcaagacttctggatacacattcactgaatacaccatgcactgggtgaagcagagccatggaaagagccttgagtggattggaggtattaatcctaacaatggtggtactagctacaaccagaagttcaagggcaaggccacattgactgtagacaagtcctccagcacagcctacatggagctccgcagcctgacatctgaggattctgcagtctattactgtgcaaggggtcccgcctggtttgcttactggggccaagggactctggtcactgtctctgca

SEQ ID NO: 199 - protein, 116 aa, Mus musculus
EVQLQQSGPELVKPGASVKISCKTSGYTFTEYTMHWVKQSHGKSLEWIGGINPNNGGTSYNQKFKGKATLTVDKSSSTAYMELRSLTSEDSAVYYCARGPAWFAYWGQGTLVTVSA

SEQ ID NO: 200 - DNA, 321 bp, Mus musculus
  misc_feature (1)..(321): SC16.80 VL
  CDS (1)..(321)
gaaacaactgtgacccagtctccagcatccctgtccatggctataggagaaaaagtcaccatcagatgcataaccagcactgatattgatgatgatatgatctggtaccagcagaagccaggggaacctcctaagctccttatttcagaaggcaatactcttcgtcctggagtcccatcccgattctccagcagtggctatggtacagattttgtttttacaattgaaaacatgctctcagaagatgttgccgattactactgtttgaaaagggatgacttgccttacacgttcggcggggggacacaggtggaaattaaa

SEQ ID NO: 201 - protein, 107 aa, Mus musculus
ETTVTQSPASLSMAIGEKVTIRCITSTDIDDDMIWYQQKPGEPPKLLISEGNTLRPGVPSRFSSSGYGTDFVFTIENMLSEDVADYYCLKRDDLPYTFGGGTQVEIK

SEQ ID NO: 202 - DNA, 351 bp, Mus musculus
  misc_feature (1)..(351): SC16.80 VH
  CDS (1)..(351)
gaggtccagctgcaacagtctggacctgagctggtgaagcctggaggttcaaagaagatatcctgcaaggcttctggttactcattcactggctacagtatgaactgggtgaagcagagccatggaaagaaccttgagtggattggacttattaatccttacagtggtggtactatctacaaccagaaattcaagggcaaggccacattaactgtagacaagtcatccagcacagcctacatggagctcctcagtctgacatctgaggactctgcagtctattactgtgcaagaaggagtgattacccgttagtttactggggccaagggactctggtcactgtctctgca

SEQ ID NO: 203 - protein, 117 aa, Mus musculus
EVQLQQSGPELVKPGGSKKISCKASGYSFTGYSMNWVKQSHGKNLEWIGLINPYSGGTIYNQKFKGKATLTVDKSSSTAYMELLSLTSEDSAVYYCARRSDYPLVYWGQGTLVTVSA

SEQ ID NO: 204 - DNA, 324 bp, Mus musculus
  misc_feature (1)..(324): SC16.81 VL
  CDS (1)..(324)
caaattgttctcacccagtctccagcaatcatgtctgcatctctaggggaacgggtcaccctgacctgcactgccagctcaagtgtaagttccagttacttgcactggtaccagcagaagccaggatcctcccccaaactctggatttatagcacatccaacctggcttctggagtcccaactcgcttcagtggcagtgggtctgggacctcttactctctcagaatcagcagcatggaggctgaagatgctgccacttattactgccaccagtataatcgttccccgctcacgttcggtgctgggaccaagctggagctgaaa

SEQ ID NO: 205 - protein, 108 aa, Mus musculus
QIVLTQSPAIMSASLGERVTLTCTASSSVSSSYLHWYQQKPGSSPKLWIYSTSNLASGVPTRFSGSGSGTSYSLRISSMEAEDAATYYCHQYNRSPLTFGAGTKLELK

SEQ ID NO: 206 - DNA, 351 bp, Mus musculus
  misc_feature (1)..(351): SC16.81 VH
  CDS (1)..(351)
caggtgcagctgaaggagtcaggacctgtcctggtggcgccctcacagagcctgtccatcacttgcactgtctctgggttttcattaaccagctatggtgtacactgggttcgccagcctccaggaaagggtctggagtggctgggagtaatttgggctggtggaagtacaaattataattcagctctcatgtccagactgagcatcagcaaagacaactccaagagccaagttttcttaaaaatgaacagtctgcaaactgatgacacagccatgtactactgtgccaaacagggcaacttctatgctatggactactggggtcaaggaacctcagtcaccgtctcctca

SEQ ID NO: 207 - protein, 117 aa, Mus musculus
QVQLKESGPVLVAPSQSLSITCTVSGFSLTSYGVHWVRQPPGKGLEWLGVIWAGGSTNYNSALMSRLSISKDNSKSQVFLKMNSLQTDDTAMYYCAKQGNFYAMDYWGQGTSVTVSS

SEQ ID NO: 208 - DNA, 318 bp, Mus musculus
  misc_feature (1)..(318): SC16.84 VL
  CDS (1)..(318)
gacatccagatgacacagtctccatcctcactgtctgcatctctgggaggcaaagtcaccatcacttgcaaggcaagccaagacattaagaagtatatagcttggtaccaacacaagcctggaaaaggtcctaggctactcatacattacacatctacattagagccaggcatcccatcaaggttcagtggaagtgggtctgggagagattattccttcagcatcagcaacctggagcctgaagatattgcaacttattattgtctacaatatgatattctgtggacgttcggtggaggcaccaagctggaaatcaaa

SEQ ID NO: 209 - protein, 106 aa, Mus musculus
DIQMTQSPSSLSASLGGKVTITCKASQDIKKYIAWYQHKPGKGPRLLIHYTSTLEPGIPSRFSGSGSGRDYSFSISNLEPEDIATYYCLQYDILWTFGGGTKLEIK

SEQ ID NO: 210 - DNA, 363 bp, Mus musculus
  misc_feature (1)..(363): SC16.84 VH
  CDS (1)..(363)
gaggtccagctgcaacagtctggacctgagctggtgaagcctggagcttcaatgaagatatcctgcaaggcttctggttactcattcactggctacaccatgaactgggtgaagcagagccatggaaagaaccttgagtggattggacttattaatccttacaatggtggtactacctacaaccagaagttcaagggcaaggccacattaactgtagacaagtcatccagcacagcctacatggagctcctcagtctgacatctgaggactctgcagtctattactgtgcattaggttactatggtaactacaggaggtacttcgatgtctggggcgcagggaccacggtcaccgtctcctca

SEQ ID NO: 211 - protein, 121 aa, Mus musculus
EVQLQQSGPELVKPGASMKISCKASGYSFTGYTMNWVKQSHGKNLEWIGLINPYNGGTTYNQKFKGKATLTVDKSSSTAYMELLSLTSEDSAVYYCALGYYGNYRRYFDVWGAGTTVTVSS

SEQ ID NO: 212 - DNA, 324 bp, Mus musculus
  misc_feature (1)..(324): SC16.88 VL
  CDS (1)..(324)
gaaaatgtgctcacccagtctccagcaataatggctgcctctctggggcagaaggtcaccatgacctgcagtgccagctcaagtgtaagttccagttacttgcactggtaccagcagaagtcaggcgcttcccccaaacccttgattcataggacatccaacctggcttctggagtcccagctcgcttcagtggcagtgggtctgggacctcttactctctcacaatcagcagcgtggaggctgaagatgatgcaacttattactgccggcagtggagtggttacccgtggacgttcggtggaggcaccaagctggaaatcaaa

SEQ ID NO: 213 - protein, 108 aa, Mus musculus
ENVLTQSPAIMAASLGQKVTMTCSASSSVSSSYLHWYQQKSGASPKPLIHRTSNLASGVPARFSGSGSGTSYSLTISSVEAEDDATYYCRQWSGYPWTFGGGTKLEIK

SEQ ID NO: 214 - DNA, 357 bp, Mus musculus
  misc_feature (1)..(357): SC16.88 VH
  CDS (1)..(357)
caggttcagctgcagcagtctggggctgagctggcaagacctggggcttcagtgaagttgtcctgcaaggcttctggctacacctgtactagctactggatgcagtgggtaaaacagaggcctggacagggtctggaatggattggggctatttatcctggagatggtgatactaggtacactcagaagttcaagggcaaggccacattgactgcagataaatcctccagcacagcctacatgcaactcagcagcttggcatctgaggactctgcggtctattactgtgcaagggggaggcggacggaggcctggtttgcttactggggccaagggactctggtcactgtctctgca

SEQ ID NO: 215 - protein, 119 aa, Mus musculus
QVQLQQSGAELARPGASVKLSCKASGYTCTSYWMQWVKQRPGQGLEWIGAIYPGDGDTRYTQKFKGKATLTADKSSSTAYMQLSSLASEDSAVYYCARGRRTEAWFAYWGQGTLVTVSA

SEQ ID NO: 216 - DNA, 324 bp, Mus musculus
  misc_feature (1)..(324): SC16.101 VL
  CDS (1)..(324)
caaattgttctcacccagtctccagcaatcatgtctgcatctctaggggaacgggtcaccatgacctgcactgccagctcaagtgtaagttccagttacttgcactggtaccagcagaagccaggatcctcccccaaactctggatttatagcacatccaacctggcttctggagtcccagctcgcttcagtggcagtgagtctgggacctcttactctctcacaatcagcaacatggaggctgaggatgctgccacttattactgccaccagtatcatcgttccccattcacgttcggctcggggacaaagttggaaataaaa

SEQ ID NO: 217 - protein, 108 aa, Mus musculus
QIVLTQSPAIMSASLGERVTMTCTASSSVSSSYLHWYQQKPGSSPKLWIYSTSNLASGVPARFSGSESGTSYSLTISNMEAEDAATYYCHQYHRSPFTFGSGTKLEIK

SEQ ID NO: 218 - DNA, 360 bp, Mus musculus
  misc_feature (1)..(360): SC16.101 VH
  CDS (1)..(360)
caggttactctgaaagagtctggccctgggatattgcagccctcccagaccctcagtctgacttgttctttctctggattttcactgagcacttctggtatgggcgtaggctggattcgtcagccatcagggaagggtctggagtggctggcacacatttggtgggatgatgtcaagcgctataacccagcccttaagagccgactgactatctccaaggatgcctccagcagccaggtattcctcaagatcgccagtgtggacactgcagaaactgccacatactactgtgcccacatcctcgaccgggcttactactttgactactggggccaaggcaccactctcacagtcacctca

SEQ ID NO: 219 - protein, 120 aa, Mus musculus
QVTLKESGPGILQPSQTLSLTCSFSGFSLSTSGMGVGWIRQPSGKGLEWLAHIWWDDVKRYNPALKSRLTISKDASSSQVFLKIASVDTAETATYYCAHILDRAYYFDYWGQGTTLTVTS

SEQ ID NO: 220 - DNA, 333 bp, Mus musculus
  misc_feature (1)..(333): SC16.103 VL
  CDS (1)..(333)
gacattgtgctgacacagtctcctgcttccttagctgtatctctggggcagagggccaccatctcatgcagggccagcaaaagtgtcagtacatctggctatagttatatgcactggtaccaacagaaaccaggacagccacccaaactcctcatctatcttgcatccaacctagaatctggggtccctgccaggttcagtggcagtgggtctgggacagacttcaccctcaacatccatcctgtggaggaggaggatgctgcaacctattactgtcagcacagtagggagcttcctctcacgttcggtgctgggaccaagctggagctgaaa

SEQ ID NO: 221 - protein, 111 aa, Mus musculus
DIVLTQSPASLAVSLGQRATISCRASKSVSTSGYSYMHWYQQKPGQPPKLLIYLASNLESGVPARFSGSGSGTDFTLNIHPVEEEDAATYYCQHSRELPLTFGAGTKLELK

SEQ ID NO: 222 - DNA, 357 bp, Mus musculus
  misc_feature (1)..(357): SC16.103 VH
  CDS (1)..(357)
caagttactctaaaagagtctggccctgggatattgaagccctcacagaccctcagtctgacttgttctttctctgggttttcactgagcacttctggtatgggtataggctggattcgtcagccttcagggaagggtctggagtggctggcacacatttggtgggatgatgataagtactataacccatccctgaagagccagctcacaatctccaaggattcctccagaaaccaggttttcctcaagatcaccagtgtggacactgcagatactgccacttactactgtgctcgaagagggactgcgtactactttgactactggggccaaggcaccactctcacagtctcctca

SEQ ID NO: 223 - protein, 119 aa, Mus musculus
QVTLKESGPGILKPSQTLSLTCSFSGFSLSTSGMGIGWIRQPSGKGLEWLAHIWWDDDKYYNPSLKSQLTISKDSSRNQVFLKITSVDTADTATYYCARRGTAYYFDYWGQGTTLTVSS

SEQ ID NO: 224 - DNA, 318 bp, Mus musculus
  misc_feature (1)..(318): SC16.104 VL
  CDS (1)..(318)
caaattgttctctcccagtctccagcaatcctgtctgcatctccaggggagaaggtcacaatgacttgcagggccagttcaagtgtaagttacattcactggtaccggcagaagccaggatcctcccccaaaccctggatttatgccacatccaacctggcttctggagtccctgctcgcttcagtggcagtgggtctgggacctcttactctctcacaatcagcagagtggaggctgaagatgctgccacttattactgccagcagtggagcagtaatccacccacgttcggtgctgggaccaagctggagctgaaa

SEQ ID NO: 225 - protein, 106 aa, Mus musculus
QIVLSQSPAILSASPGEKVTMTCRASSSVSYIHWYRQKPGSSPKPWIYATSNLASGVPARFSGSGSGTSYSLTISRVEAEDAATYYCQQWSSNPPTFGAGTKLELK

SEQ ID NO: 226 - DNA, 345 bp, Mus musculus
  misc_feature (1)..(345): SC16.104 VH
  CDS (1)..(345)
caggtgcagctgaaggagtcaggacctgaccttgtgcagccctcacagaccctgtctctcacctgcactgtctctgggttctcattaaccttctatggtgttcactgggttcgccagcctccaggaaagggactggagtgggtgggaacaatgggctgggatgacaaaaaatattataattcagctctaaaatctcgactgagcatcagcagggatacctccaagaaccaggttttcttaaaactgagcagtctgcaaactgaagacacagccatgtactactgtactagaggtgggacggggtttgactactggggccaaggcaccactctcacagtctcctca

SEQ ID NO: 227 - protein, 115 aa, Mus musculus
QVQLKESGPDLVQPSQTLSLTCTVSGFSLTFYGVHWVRQPPGKGLEWVGTMGWDDKKYYNSALKSRLSISRDTSKNQVFLKLSSLQTEDTAMYYCTRGGTGFDYWGQGTTLTVSS

SEQ ID NO: 228 - DNA, 321 bp, Mus musculus
  misc_feature (1)..(321): SC16.105 VL
  CDS (1)..(321)
gacattgtgatgacccagtcgcacaaattcatgtccacatcagtaggagacagggtcagcatcacctgcaaggccagtcaggatgtgggtactgctgtagcctggtatcaacagaaaccagggcaatctcctaaactactgatttactgggcatccatccggcacactggagtccctgatcgcttcacaggcagtggatctgggacagatttcactctcaccattagcaatgtgcagtctgaagacttggcagattatttctgtcagcaatatagcagctatccgctcacgttcggtgctgggaccaagctggagctgaaa

SEQ ID NO: 229 - protein, 107 aa, Mus musculus
DIVMTQSHKFMSTSVGDRVSITCKASQDVGTAVAWYQQKPGQSPKLLIYWASIRHTGVPDRFTGSGSGTDFTLTISNVQSEDLADYFCQQYSSYPLTFGAGTKLELK

SEQ ID NO: 230 - DNA, 363 bp, Mus musculus
  misc_feature (1)..(363): SC16.105 VH
  CDS (1)..(363)
caggtccaactgcagcagcctggggctgagcttgtgaagcctggggcttcagtgaagctgtcctgcaaggcttctggctacaccttcaccagctactggatgcactgggtgaagcagaggcctggacaaggccttgagtggattggagtgattaatcctagcaacggtcgtactaactacaatgagaagttcaagagcaaggccacactgactgtagacaaatcctccagcacagcctacatgcaactcagcagcctgacatctgaggactctgcggtctattactgtgcaagaagaagggaactgggaaccctctatgctatggactactggggtcaaggaacctcagtcaccgtctcctca

SEQ ID NO: 231 - protein, 121 aa, Mus musculus
QVQLQQPGAELVKPGASVKLSCKASGYTFTSYWMHWVKQRPGQGLEWIGVINPSNGRTNYNEKFKSKATLTVDKSSSTAYMQLSSLTSEDSAVYYCARRRELGTLYAMDYWGQGTSVTVSS

SEQ ID NO: 232 - DNA, 321 bp, Mus musculus
  misc_feature (1)..(321): SC16.106 VL
  CDS (1)..(321)
gacatcaagatgacccagtctccatcttccatgtatgcatctctaggagagagagtcactatcacttgcaaggcgagtcaggacattaatagctatttaagctggttccagcagaaaccagggaaatctcctaagaccctgatctatcgtgcaaacagattggtagatggggtcccatcaaggttcagtggcagtggatctgggcaagattattctctcaccatcagcagcctggagtatgaagatatgggaatttattattgtctacagtatgatgagtttccattcacgttcggctcggggacaaagttggaaataaaa

SEQ ID NO: 233 - protein, 107 aa, Mus musculus
DIKMTQSPSSMYASLGERVTITCKASQDINSYLSWFQQKPGKSPKTLIYRANRLVDGVPSRFSGSGSGQDYSLTISSLEYEDMGIYYCLQYDEFPFTFGSGTKLEIK

SEQ ID NO: 234 - DNA, 345 bp, Mus musculus
  misc_feature (1)..(345): SC16.106 VH
  CDS (1)..(345)
caggtgcaactgaagcagtcaggacctggcctggtggcgccctcacagagcctgttcatcacatgcaccgtctcagggttctcattaaccagctatgaaataaactgggttcgccagcctccaggaaagggtctggagtggctgggagtgatatggactggtggaagcacaaattataattcagctctcatatccagactgagcatcagcaaagacaactccaagagcctagttttcttaaaaatgaacagtctgcaaactgatgacacagccatatattactgtgtaagaggtgtttatgctatggactactggggtcaaggaacctcagtcaccgtctcctca

SEQ ID NO: 235 - protein, 115 aa, Mus musculus
QVQLKQSGPGLVAPSQSLFITCTVSGFSLTSYEINWVRQPPGKGLEWLGVIWTGGSTNYNSALISRLSISKDNSKSLVFLKMNSLQTDDTAIYYCVRGVYAMDYWGQGTSVTVSS

SEQ ID NO: 236 - DNA, 321 bp, Mus musculus
  misc_feature (1)..(321): SC16.107 VL
  CDS (1)..(321)
gacattgtgatgacccagtctcacaaattcatgtccacatcagtaggagacagggtcagcatcacctgcaaggccagtcaggatgtgaatactgctgtaggctggtatcaacagaaaccaggacaatctcctaaactactgatttactcggcatcctaccggtacactggagtccctgatcgcttcactggcagtggatctgggacggatttcactttcaccatcagcagtgtgcaggctgaagacctggcagtttattactgtcagcaacattatagtagtccgtacacgttcggaggggggaccaaggtggaaataaaa

SEQ ID NO: 237 - protein, 107 aa, Mus musculus
DIVMTQSHKFMSTSVGDRVSITCKASQDVNTAVGWYQQKPGQSPKLLIYSASYRYTGVPDRFTGSGSGTDFTFTISSVQAEDLAVYYCQQHYSSPYTFGGGTKVEIK

SEQ ID NO: 238 - DNA, 357 bp, Mus musculus
  misc_feature (1)..(357): SC16.107 VH
  CDS (1)..(357)
gaggtccagctgcagcagtctggacctgagctggtaaagcctggggcttcagtgaagatgtcctgcaaggcttctggatacacattcactaactatgttatgcactgggtgaagcagaagcctgggcagggccttgagtggattggatatattaatccttacaatgatggtactaaatacaatgagaagttcaaaggcaaggccacactgacttcagacaaatcctccaccacagcctacatggcgctcagcagcctgacctctgaggactctgcggtctattactgtgcagtagcctactatagtaactgggggtttgcttactggggccaagggactctggtcactgtctctgca

SEQ ID NO: 239 - protein, 119 aa, Mus musculus
EVQLQQSGPELVKPGASVKMSCKASGYTFTNYVMHWVKQKPGQGLEWIGYINPYNDGTKYNEKFKGKATLTSDKSSTTAYMALSSLTSEDSAVYYCAVAYYSNWGFAYWGQGTLVTVSA

SEQ ID NO: 240 - DNA, 321 bp, Mus musculus
  misc_feature (1)..(321): SC16.108 VL
  CDS (1)..(321)
gacatccagatgactcagtctccagcctccctatctgcatctgtgggagaaactgtcaccatcacatgtcgagcaagtgagaatatttacagttatttagcatggtatcagcagaaacagggaaaatctcctcagctcctggtctataatgcaaaaaccttagcagaaggtgtgccatcaaggttcagtggcagtagatcaggctcacagttttctctgaagatcaacagcctgcagcctgaagattttgggagttattactgtcaacatcattatggtactccgtacacgttcggaggggggaccaagctggaaataaaa

SEQ ID NO: 241 - protein, 107 aa, Mus musculus
DIQMTQSPASLSASVGETVTITCRASENIYSYLAWYQQKQGKSPQLLVYNAKTLAEGVPSRFSGSRSGSQFSLKINSLQPEDFGSYYCQHHYGTPYTFGGGTKLEIK

SEQ ID NO: 242 - DNA, 360 bp, Mus musculus
  misc_feature (1)..(360): SC16.108 VH
  CDS (1)..(360)
caggttcagctggaggagtcaggggctgagctggcaagacctggggcttcagtgaagttgtcctgcaaggcttctggctatagctactggatgcagtggataaaacagaggcctggacagggtctggaatggattggggctatttatcctggaaatggtgatactaggtacactcagaagttcaagggcaaggccacattgactgcagataaatcctccagcacagcctacatgcaactcagcagcttggcatctgaggactctgcggtctattactgtgcaagatctccggcctactataggtacggcgagggctactttgactactggggccaaggcaccactctcacagtctcctca

SEQ ID NO: 243 - protein, 120 aa, Mus musculus
QVQLEESGAELARPGASVKLSCKASGYSYWMQWIKQRPGQGLEWIGAIYPGNGDTRYTQKFKGKATLTADKSSSTAYMQLSSLASEDSAVYYCARSPAYYRYGEGYFDYWGQGTTLTVSS

SEQ ID NO: 244 - DNA, 318 bp, Mus musculus
  misc_feature (1)..(318): SC16.109 VL
  CDS (1)..(318)
caaattgttctcacccagtctccagcaatcatgtctgcatctccaggggagaaggtcaccatgacctgcagtgccagctcaagtgtaagttacatgtactggtaccagcagaagccaggatcctcccccagactcctgatttatgacacatccaacctggcttctggagtccctgttcgcttcagtggcagtgggtctgggacctctttctctctcacaatcagccgaatggaggctgaagatactgccacttattactgccaggagtggagtggtaatccgctcacgttcggtgatgggaccaagctggagctgaaa

SEQ ID NO: 245 - protein, 106 aa, Mus musculus
QIVLTQSPAIMSASPGEKVTMTCSASSSVSYMYWYQQKPGSSPRLLIYDTSNLASGVPVRFSGSGSGTSFSLTISRMEAEDTATYYCQEWSGNPLTFGDGTKLELK

SEQ ID NO: 246 - DNA, 354 bp, Mus musculus
  misc_feature (1)..(354): SC16.109 VH
  CDS (1)..(354)
cagatccagttggtgcagtctggacctgagctgaagaagcctggagagacagtcaagatctcctgcaaggcttctgggtataccttcacaaactatggaatgaactgggtgaagcaggctccaggaaagggtttaaagtggatgggctggataaacacctacactggagagccagcatatgctgatgacttcaagggacggtttgccttctctttggaaacctctgccagcgctgcctatttgcagatcaacaacctcaaaaatgaggacacggctacttttttctgtgcaaatatgaggcccacgagggggtttgcttactgggggcaagggactctgggcactgtctctgca

SEQ ID NO: 247 - protein, 118 aa, Mus musculus
QIQLVQSGPELKKPGETVKISCKASGYTFTNYGMNWVKQAPGKGLKWMGWINTYTGEPAYADDFKGRFAFSLETSASAAYLQINNLKNEDTATFFCANMRPTRGFAYWGQGTLGTVSA

SEQ ID NO: 248 - DNA, 321 bp, Mus musculus
  misc_feature (1)..(321): SC16.110 VL
  CDS (1)..(321)
aatattgtgatgacccagactcccaaattcctgcttgtatcagcaggagacagggttaccataacctgcaaggccagtcagagtgtgagtaatgatgtagcttggtaccaacagaagccagggcagtctcctaaactgctgatatactatgcatccaatcgctacactggagtccctgatcgcttcactggcagtggatatgggacggatttcactttcaccatcagcactgtgcaggctgaagacctggcagtttatttctgtcagcaggattatagctctcctccgacgttcggtggaggcaccaagctggaaatcaaa

SEQ ID NO: 249 - protein, 107 aa, Mus musculus
NIVMTQTPKFLLVSAGDRVTITCKASQSVSNDVAWYQQKPGQSPKLLIYYASNRYTGVPDRFTGSGYGTDFTFTISTVQAEDLAVYFCQQDYSSPPTFGGGTKLEIK

SEQ ID NO: 250 - DNA, 354 bp, Mus musculus
  misc_feature (1)..(354): SC16.110 VH
  CDS (1)..(354)
gaggtccagctgcagcagtctggacctgggctagtgaggactggggcttcagtgaagatatcctgcaaggcttctggttactcattcactggttactacatgcactgggtcaagcagagccatggaaagagccttgagtggattggatatattagttgttacaatggtgctactacctacaaccagaacttcaagggcaaggccacatttattgtagacacatcctccagcacagcctacatgcagttcaacagcctgacatctgaggactctgcggtctattactgtgcaagatccgacggggggcatgctatggactactggggtcaaggaacctcagtcaccgtctcctca

SEQ ID NO: 251 - protein, 118 aa, Mus musculus
EVQLQQSGPGLVRTGASVKISCKASGYSFTGYYMHWVKQSHGKSLEWIGYISCYNGATTYNQNFKGKATFIVDTSSSTAYMQFNSLTSEDSAVYYCARSDGGHAMDYWGQGTSVTVSS

SEQ ID NO: 252 - DNA, 321 bp, Mus musculus
  misc_feature (1)..(321): SC16.111 VL
  CDS (1)..(321)
gacatccagatgactcagtctccagcctccctggctgcatctgtgggagaaactgtcaccatcacatgtcgagcaagtgagaacatttactacagtttagcatggtatcagcagaagcaagggaaatctcctcagctcctgatctataatgcaaacagcttggaagatggtgtcccatcgaggttcagtggcagtggatctgggacacagtattctatgaagatcaacagcatgcagcctgaagataccgcaacttatttctgtaagcagacttatgacgttccgctcacgttcggtgctgggaccaagctggagctgaaa

SEQ ID NO: 253 - protein, 107 aa, Mus musculus
DIQMTQSPASLAASVGETVTITCRASENIYYSLAWYQQKQGKSPQLLIYNANSLEDGVPSRFSGSGSGTQYSMKINSMQPEDTATYFCKQTYDVPLTFGAGTKLELK

SEQ ID NO: 254 - DNA, 351 bp, Mus musculus
  misc_feature (1)..(351): SC16.111 VH
  CDS (1)..(351)
gaggttcagctgcagcagtctggacctgagctggagaagcctggcgcttcagtgaagatatcctgcaaggcttctggttactcattcactggctacaacatgaactgggtgaagcagagcaatggaaagagccttgagtggattggaaatattgatccttattatggtggttctagctacaaacagaagttcgagggcaaggccacattgactgtagacaaatcctccagcacagcctacatgcagctcaagagcctgacatctgaggactctgcagtctattactgtgcaagaggtggtagtaacttctttgactactggggccaaggcaccactctcacagtctcctca

SEQ ID NO: 255 - protein, 117 aa, Mus musculus
EVQLQQSGPELEKPGASVKISCKASGYSFTGYNMNWVKQSNGKSLEWIGNIDPYYGGSSYKQKFEGKATLTVDKSSSTAYMQLKSLTSEDSAVYYCARGGSNFFDYWGQGTTLTVSS

SEQ ID NO: 256 - DNA, 336 bp, Mus musculus
  misc_feature (1)..(336): SC16.113 VL
  CDS (1)..(336)
gatgttgtgatgacccagactccactcactttgtcggttaccattggacaaccagcctccatctcttgcaagtcaagtcagagcctcttagatagtgatggaacgacatatttgaattggttgttacagaggccaggccagtctccaaagcgcctaatctatctggtgtctaaactggactctggagtccctgacaggttcactggcagtggatcagggacagatttcacactgaaaatcagcagagtggaggctgaggatttgggagtttattattgctggcaaggtacacattttccgctcacgttcggtgctgggaccaagctggagctgaaa

SEQ ID NO: 257 - protein, 112 aa, Mus musculus
DVVMTQTPLTLSVTIGQPASISCKSSQSLLDSDGTTYLNWLLQRPGQSPKRLIYLVSKLDSGVPDRFTGSGSGTDFTLKISRVEAEDLGVYYCWQGTHFPLTFGAGTKLELK

SEQ ID NO: 258 - DNA, 351 bp, Mus musculus
  misc_feature (1)..(351): SC16.113 VH
  CDS (1)..(351)
gacgtgaagctggtggagtctgggggaggcttagtgaagcctggagggtccctgaaactctcctgtgcagcctctggattcactttcagtagctataccatgtcttgggttcgccagactccggagaagaggctggagtgggtcgcaaccattagtagtggtggtagttacccctactatccagacagtgtgaagggccgattcaccatctccagagacaatgccaagaacaccctgtacctgcaaatgagcagtctgaagtctgaggacacagccatgtattactgtacaagagatgtctatgatggttactcctactggggccaaggcaccactctcacagtctcctca

SEQ ID NO: 259 - protein, 117 aa, Mus musculus
DVKLVESGGGLVKPGGSLKLSCAASGFTFSSYTMSWVRQTPEKRLEWVATISSGGSYPYYPDSVKGRFTISRDNAKNTLYLQMSSLKSEDTAMYYCTRDVYDGYSYWGQGTTLTVSS

SEQ ID NO: 260 - DNA, 318 bp, Mus musculus
  misc_feature (1)..(318): SC16.114 VL
  CDS (1)..(318)
caaattgttctctcccagtctccagcaatcctgtctgcatctccaggggagaaggtcacaatgacttgcagggccagctcaagtgtaagttacatgcactggtaccagcagaagccaggatcctcccccaaaccctggatttatgccacatccaacctggcttctggagtccctgctcgcttcagtggcagtgggtctgggacctcttactctctcacaatcagcagagtggaggctgaagatgctgccacttattactgccagcagtggagtagtaacccatacacgttcggaggggggaccaagctggaaataaaa

SEQ ID NO: 261 - protein, 106 aa, Mus musculus
QIVLSQSPAILSASPGEKVTMTCRASSSVSYMHWYQQKPGSSPKPWIYATSNLASGVPARFSGSGSGTSYSLTISRVEAEDAATYYCQQWSSNPYTFGGGTKLEIK

SEQ ID NO: 262 - DNA, 369 bp, Mus musculus
  misc_feature (1)..(369): SC16.114 VH
  CDS (1)..(369)
gaggttcagctgcagcagtctggggcagaacttgtgaagccaggggcctcagtcaaattgtcctgcacagcttctggcttcaacattaaagacacctatatacactgggtgaaacagaggcctgaacagggcctggagtggattggaaggattgatcctgcgaatggtaatactaaatatgacccgaagttccagggcaaggccactataacaccagacacatcctccaacacagcctacctgcagctcagcagcctgacatctgaggacactgccgtctattactgtgctagaagctggcgaaactacggtagtagtttctggtacttcgatgtctggggcgcagggaccacggtcaccgtctcctca

SEQ ID NO: 263 - protein, 123 aa, Mus musculus
EVQLQQSGAELVKPGASVKLSCTASGFNIKDTYIHWVKQRPEQGLEWIGRIDPANGNTKYDPKFQGKATITPDTSSNTAYLQLSSLTSEDTAVYYCARSWRNYGSSFWYFDVWGAGTTVTVSS

SEQ ID NO: 264 - DNA, 336 bp, Mus musculus; identical to SEQ ID NO: 256
  misc_feature (1)..(336): SC16.115 VL
  CDS (1)..(336)

SEQ ID NO: 265 - protein, 112 aa, Mus musculus; identical to SEQ ID NO: 257

SEQ ID NO: 266 - DNA, 351 bp, Mus musculus; identical to SEQ ID NO: 258
  misc_feature (1)..(351): SC16.115 VH
  CDS (1)..(351)

SEQ ID NO: 267 - protein, 117 aa, Mus musculus; identical to SEQ ID NO: 259

SEQ ID NO: 268 - DNA, 333 bp, Mus musculus
  misc_feature (1)..(333): SC16.116 VL
  CDS (1)..(333)
gacattgtgatgacacagtctccatcctccctgactgtgacagcaggagagaaggtcactatgagctgcacgtccagtcagagtctgttaaccagtggaaatcaaaagaactacttgacctggtaccagcagaaaccagggcagcctcctaaactgttgatctactgggcatccactagggaatctggggtccctgatcgcttcacaggcagtggatctggaacagatttcactctcaccatcagcagtttgcaggctgaagacctggcagtttattactgtcagaatgattatagtctcacgttcggtgctgggaccaagctggagctgaaa

SEQ ID NO: 269 - protein, 111 aa, Mus musculus
DIVMTQSPSSLTVTAGEKVTMSCTSSQSLLTSGNQKNYLTWYQQKPGQPPKLLIYWASTRESGVPDRFTGSGSGTDFTLTISSLQAEDLAVYYCQNDYSLTFGAGTKLELK

SEQ ID NO: 270 - DNA, 354 bp, Mus musculus
  misc_feature (1)..(354): SC16.116 VH
  CDS (1)..(354)
caggtgcagctgaagcagtcaggacctggccgagtgcagccctcacagagcctgtccatcacctgcacagtctctggtttttcattaactagcaatggtgtacactgggttcgccagtctccaggaaagggtctggagtggctgggagtgctatggagtggtggaagcacagactataatgcagctttcatatccagactgagcatcagcaaggacaattacaagagccaagttttctttaaaatgaacagtctgcaagctaatgacacagccatatattactgtgccagaaataataataggtacggagctatggactactggggtcaaggaacctcagtcaccgtctcctca

SEQ ID NO: 271 - protein, 118 aa, Mus musculus
QVQLKQSGPGRVQPSQSLSITCTVSGFSLTSNGVHWVRQSPGKGLEWLGVLWSGGSTDYNAAFISRLSISKDNYKSQVFFKMNSLQANDTAIYYCARNNNRYGAMDYWGQGTSVTVSS

SEQ ID NO: 272 - DNA, 321 bp, Mus musculus
  misc_feature (1)..(321): SC16.117 VL
  CDS (1)..(321)
gacatccagatgaaccagtctccatccagtctgtctgcatcccttggagacacaattaccatcacttgccatgtcagtcagaacattaatgtttggttaagctggtaccagcagaaaccaggaaatattcctaaactattgatccaaaaggcttccaacttgcacacaggcgtcccctcaaggtttagtggcagtggatctggaacaggtttcacattaaccatcagcagcctgcagcctgaagacattgccacttactactgtcaacagggtcaaagttatccattcacgttcggctcggggacaaagttggaaataaaa

SEQ ID NO: 273 - protein, 107 aa, Mus musculus
DIQMNQSPSSLSASLGDTITITCHVSQNINVWLSWYQQKPGNIPKLLIQKASNLHTGVPSRFSGSGSGTGFTLTISSLQPEDIATYYCQQGQSYPFTFGSGTKLEIK

SEQ ID NO: 274 - DNA, 351 bp, Mus musculus
  misc_feature (1)..(351): SC16.117 VH
  CDS (1)..(351)
caggtgcagctgaaggagtcaggacctggcctggtggcgccctcacagagcctgtccatcacttgcactgtctctgggttttcattaaccaactatggtgtacactgggttcgccagcctccaggaaagggtctggagtggctgggagtaatatgggctggtggaatcacaaattataattcggctctcatgtccagactgagcatcagcgaagacaactccaagagccaagttttcttaaaaatgaacagtctgcaaactgatgacacagccatgtactactgtgccagaaatttaggtccctatgctatggactactggggtcaaggaacctcagtcaccgtctcctca

SEQ ID NO: 275 - protein, 117 aa, Mus musculus
QVQLKESGPGLVAPSQSLSITCTVSGFSLTNYGVHWVRQPPGKGLEWLGVIWAGGITNYNSALMSRLSISEDNSKSQVFLKMNSLQTDDTAMYYCARNLGPYAMDYWGQGTSVTVSS

SEQ ID NO: 276 - DNA, 333 bp, Mus musculus
  misc_feature (1)..(333): SC16.118 VL
  CDS (1)..(333)
gacattgtgctgacccaatctccagcttctttggctgtgtctctagggcagagggccaccatctcctgcaaggccagccaaagtgttgattatgatggtgatagttatttgacctggtaccaacagaaaccaggacagccacccaaactcctcatctatgctgcatccaatctagaatctgggatcccagccaggtttagtggcagtgggtctgggacagacttcaccctcaacatccatcctgtggaggaggaggacgctgcaacctattactgtcagcaaagtaatgaggatccgtacacgttcggaggggggaccaagctggaaataaaa

SEQ ID NO: 277 - protein, 111 aa, Mus musculus
DIVLTQSPASLAVSLGQRATISCKASQSVDYDGDSYLTWYQQKPGQPPKLLIYAASNLESGIPARFSGSGSGTDFTLNIHPVEEEDAATYYCQQSNEDPYTFGGGTKLEIK

SEQ ID NO: 278 - DNA, 351 bp, Mus musculus
  misc_feature (1)..(351): SC16.118 VH
  CDS (1)..(351)
gaggtccagctgcagcagtctggacctgacctggtgaagcctggggcttcagtgaagatatcctgcaaggcttctggttactcattcactggctactacatgcactgggtgaagcagagccatggaaagagccttgagtggattggacgtgttaatcctaacaatggtggtactagctacaaccagaagttcaagggcaaggccatattaactgcagacaagtcatccagcacagcctacatggagctccgcagcctgacatctgaggactctgcggtctattactgtgcaagagggagttatgattacgccgagggctggggccaagggactctggtcactgtctctgca

SEQ ID NO: 279 - protein, 117 aa, Mus musculus
EVQLQQSGPDLVKPGASVKISCKASGYSFTGYYMHWVKQSHGKSLEWIGRVNPNNGGTSYNQKFKGKAILTADKSSSTAYMELRSLTSEDSAVYYCARGSYDYAEGWGQGTLVTVSA

SEQ ID NO: 280 - DNA, 339 bp, Mus musculus
  misc_feature (1)..(339): SC16.120 VL
  CDS (1)..(339)
gacattgtgatgtcacagtctccatcctccctagctgtgtcagttggagagaaggttactatgagctgcaagtccagtcagagccttttatatagtagcactcaaaagaactacttggcctggtaccagcagaaaccagggcagtctcctaaactgctgatttactgggcatccactagggaatctggggtccctgatcgcttcacaggcagtggatctgggacagatttcactctcaccatcagcagtgtgaaggctgaagacctggcagtttattactgtcagcaatattatagctatccgtacacgttcggaggggggaccaagctggaaataaaa

SEQ ID NO: 281 - protein, 113 aa, Mus musculus
DIVMSQSPSSLAVSVGEKVTMSCKSSQSLLYSSTQKNYLAWYQQKPGQSPKLLIYWASTRESGVPDRFTGSGSGTDFTLTISSVKAEDLAVYYCQQYYSYPYTFGGGTKLEIK

SEQ ID NO: 282 - DNA, 351 bp, Mus musculus
  misc_feature (1)..(351): SC16.120 VH
  CDS (1)..(351)
gagatccagctgcagcagtctggacctgagctggtgaagcctggggcttcagtgaaggtatcctgcaaggcttctggttatgcattcactagctacaacatgtactgggtgatgcagagccatggaaagagccttgagtggattggatatgttgatccttacaatggtggtactagctacaaccagaagttcaagggcaaggccacattgactgttgacaagtcctccagcacagcctacatgcatctcaacagcctgacatctgaggactctgcagtctattactgtgcaagagaaaactataggtactttgactactggggccaaggcaccactctcacagtctcctca

SEQ ID NO: 283 - protein, 117 aa, Mus musculus
EIQLQQSGPELVKPGASVKVSCKASGYAFTSYNMYWVMQSHGKSLEWIGYVDPYNGGTSYNQKFKGKATLTVDKSSSTAYMHLNSLTSEDSAVYYCARENYRYFDYWGQGTTLTVSS

SEQ ID NO: 284 - DNA, 318 bp, Mus musculus
  misc_feature (1)..(318): SC16.121 VL
  CDS (1)..(318)
caaattgttctcacccagtctccagcaatcatgtctgcatctccaggggagaaggtcaccataacctgcagtgccagctcaagtgtaagttacatgcactggttccagcagaagccaggcacttctcccaaactctggatttatagcacatccaacctggcttctggagtccctgctcgcttcagtggcagtggatctgggacctcttactctctcacaatcagccgaatggaggctgaagatgctgccacttattactgccagcaaaggagtagttacccacccacgttcggaggggggaccaagctggaaataaar

SEQ ID NO: 285 - protein, 106 aa, Mus musculus
QIVLTQSPAIMSASPGEKVTITCSASSSVSYMHWFQQKPGTSPKLWIYSTSNLASGVPARFSGSGSGTSYSLTISRMEAEDAATYYCQQRSSYPPTFGGGTKLEIK

SEQ ID NO: 286 - DNA, 372 bp, Mus musculus
  misc_feature (1)..(372): SC16.121 VH
  CDS (1)..(372)
gaggtgcagcttgttgagtctggtggaggattggtgcagcctaaagggtcattgaaactctcatgtgcagcctctggattcaccttcaatacctacgccatgaactgggtccgccaggctccaggaaagggtttggaatgggttgctcgcataagaattaaaagtaataattatgcaacatattatgccgattcagtaaaagacaggttcaccatctccagagatgattcacaaaacatgctctatctgcaaatgaacaacttgaaaactgaggacacagccgtgtattactgtgtgagacaaggctatagttacgactggggaccctggtttgcttactggggccaagggactctggtcactgtctctgca

SEQ ID NO: 287 - protein, 124 aa, Mus musculus
EVQLVESGGGLVQPKGSLKLSCAASGFTFNTYAMNWVRQAPGKGLEWVARIRIKSNNYATYYADSVKDRFTISRDDSQNMLYLQMNNLKTEDTAVYYCVRQGYSYDWGPWFAYWGQGTLVTVSA

SEQ ID NO: 288 - DNA, 321 bp, Mus musculus
  misc_feature (1)..(321): SC16.122 VL
  CDS (1)..(321)
gacattgtgatgacccagtctcaaaaattcatgtccacatcagtaggagacagggtcagcgtcacctgcaaggccagtcagaatgtgggtactaatgtagcctggtatcaacagaaaccagggcaatctcctaaagtactgatttactcggcatcctaccggtacagtggagtccctgatcgcttcacaggcagtggatctgggacagatttcactctcaccatcagcaatgtgcagtctgaagacttggcagagtttttctgtcagcaatataacagctatcctctgacgttcggtggaggcaccaagctggaaatcaaa

SEQ ID NO: 289 - protein, 107 aa, Mus musculus
DIVMTQSQKFMSTSVGDRVSVTCKASQNVGTNVAWYQQKPGQSPKVLIYSASYRYSGVPDRFTGSGSGTDFTLTISNVQSEDLAEFFCQQYNSYPLTFGGGTKLEIK

SEQ ID NO: 290 - DNA, 354 bp, Mus musculus
  misc_feature (1)..(354): SC16.122 VH
  CDS (1)..(354)
gaagtgcagctggtggagtctgggggaggcttagtgaagcctggagggtccctgaaactctcctgtgcagcctctggattcactttcagtgactattacatgttttgggttcgccagactccggaaaagaggctggagtgggtcgcaaccattagtgatggtggtagttacacctactttccagacagtgtgaaggggcgattcaccatctccagagacaatgcccagaacaacctgtacctgcaaatgagcagtctgaagtctgaggacacagccatgtattactgtgcaagagccgggaccctctatgctatggactactggggtcaaggaacctcagtcaccgtctcctca

SEQ ID NO: 291 - protein, 118 aa, Mus musculus
EVQLVESGGGLVKPGGSLKLSCAASGFTFSDYYMFWVRQTPEKRLEWVATISDGGSYTYFPDSVKGRFTISRDNAQNNLYLQMSSLKSEDTAMYYCARAGTLYAMDYWGQGTSVTVSS

SEQ ID NO: 292 - DNA, 324 bp, Mus musculus
  misc_feature (1)..(324): SC16.123 VL
  CDS (1)..(324)
caaattgttctcacccagtctccagcaatcatgtctgcatctctaggggaacgggtcaccatgacctgcactgccagctcaagtgtaagttccagttacttgcactggtaccagcagaagccaggatcctcccccaaactctggatttatagcacatccaacctggcttctggagtcccagctcgcttcagtggcagtgggtctgggacctcttactctctcacaatcagcagcatggagactgaagatgctgccacttattactgccaccagtatcatcgttcccccttcacgttcggctcggggacaaagttggaaataaaa

SEQ ID NO: 293 - protein, 108 aa, Mus musculus
QIVLTQSPAIMSASLGERVTMTCTASSSVSSSYLHWYQQKPGSSPKLWIYSTSNLASGVPARFSGSGSGTSYSLTISSMETEDAATYYCHQYHRSPFTFGSGTKLEIK

SEQ ID NO: 294 - DNA, 366 bp, Mus musculus
  misc_feature (1)..(366): SC16.123 VH
  CDS (1)..(366)
caggttgctctgaaagagtctggccctgggatattgcagccctcccagaccctcagtctgacttgttctttctctgggttttcactgagcacttctggtatgggtgtaggctggattcgtcagccatcagggaagggtctggagtggctggcacacatttggtgggatgatgtcaagcgctataacccagccctgaagagccgactgactatctccaaggatacctccagcagccaggtattcctcaagatcgccagtgtggacactgcagatactgccacatactactgtgctcgaatggaggactacggtagtagctcctactttgacttctggggccacggcaccactctcacagtctcctca

SEQ ID NO: 295 - protein, 122 aa, Mus musculus
QVALKESGPGILQPSQTLSLTCSFSGFSLSTSGMGVGWIRQPSGKGLEWLAHIWWDDVKRYNPALKSRLTISKDTSSSQVFLKIASVDTADTATYYCARMEDYGSSSYFDFWGHGTTLTVSS

SEQ ID NO: 296 - DNA, 321 bp, Mus musculus
  misc_feature (1)..(321): SC16.124 VL
  CDS (1)..(321)
gacattcagatgacccagtctcctgcctcccagtctgcatctctgggagaaagtgtcaccatcacatgcctggcaagtcagaccattggtacatggttagcatggtatcagcagaaaccagggaaatctcctcagctcctgatttctgctgcaaccagcttggcagatggggtcccatcaaggttcagtggtagtggatctggcacaaaattttctttcaagatcagcagcctacaggctgaagattttgtaagttattactgtcaacaactttacagtactccgtggacgttcggtggaggcaccaagctggaaatcaaa

SEQ ID NO: 297 - protein, 107 aa, Mus musculus
DIQMTQSPASQSASLGESVTITCLASQTIGTWLAWYQQKPGKSPQLLISAATSLADGVPSRFSGSGSGTKFSFKISSLQAEDFVSYYCQQLYSTPWTFGGGTKLEIK

SEQ ID NO: 298 - DNA, 369 bp, Mus musculus
  misc_feature (1)..(369): SC16.124 VH
  CDS (1)..(369)
gaggtccagctgcagcagtctggacctgagctggtaaagcctggggcttcagtgaagatgtcctgcaaggcttctggatacacattcactagctatgttatgcactgggtgaagcagaagcctgggcagggccttgagtggattggatatattaatccttacaatgatggtactaagtacaatgagaagttcaaaggcaaggccacactgacttcagacaaatcctccagcacagcctacatggagctcagcagcctgacctctgaggactctgcggtctattactgtgcaagaggggctctctactatggtaactacctcgggtacttcgatgtctggggcgcagggaccacggtcaccgtctcctca

SEQ ID NO: 299 - protein, 123 aa, Mus musculus
EVQLQQSGPELVKPGASVKMSCKASGYTFTSYVMHWVKQKPGQGLEWIGYINPYNDGTKYNEKFKGKATLTSDKSSSTAYMELSSLTSEDSAVYYCARGALYYGNYLGYFDVWGAGTTVTVSS

SEQ ID NO: 300 - DNA, 321 bp, Mus musculus
  misc_feature (1)..(321): SC16.125 VL
  CDS (1)..(321)
gacatccagatgaaccagtctccatccagtctgtctgcatcccttggagacacaattaccatcacttgccatgccagtcagaacattaatgtttggttaagctggtaccagcagaaaccaggaaatattcctaaactattgatctataaggcttccatcttacacacaggcgtcccatcaaggtttagtggcagtggatctggaacaggtttcacattaaccatcagcagcctgcagcctgaagacattgccacttactcctgtcaacagggtcaaagttatccgtacacgttcggaggggggaccaagctggaaataaaa

SEQ ID NO: 301 - protein, 107 aa, Mus musculus
DIQMNQSPSSLSASLGDTITITCHASQNINVWLSWYQQKPGNIPKLLIYKASILHTGVPSRFSGSGSGTGFTLTISSLQPEDIATYSCQQGQSYPYTFGGGTKLEIK

SEQ ID NO: 302 - DNA, 354 bp, Mus musculus
  misc_feature (1)..(354): SC16.125 VH
  misc_feature (354)..(354): The 'n' at position 354 may be a or g or c or t
  CDS (1)..(354)
gatgtgcagcttcaggagtcaggacctgacctggtgaaaccttctcagtcactttcactcacctgcactgtcactggctactccatcaccagtggttatagctggcactggatccggcagtttccaggaaacaaactggaatggatgggctacatacactacagtggtagcactaactacaacccatctctcaaaagtcgaatctctatcactcgagacacatccaagaaccagttcttcctgcagttcaaatctgtgactactgaagactcagccacatattactgtgccctagaggggaattacgacgggtttgcttactggggccaagggactctggtcactgtctcttcn

SEQ ID NO: 303 - protein, 118 aa, Mus musculus
  misc_feature (118)..(118): The 'Xaa' at location 118 stands for Ser.
DVQLQESGPDLVKPSQSLSLTCTVTGYSITSGYSWHWIRQFPGNKLEWMGYIHYSGSTNYNPSLKSRISITRDTSKNQFFLQFKSVTTEDSATYYCALEGNYDGFAYWGQGTLVTVSX

SEQ ID NO: 304 - DNA, 321 bp, Mus musculus
  misc_feature (1)..(321): SC16.126 VL
  CDS (1)..(321)
gacatccagatgaaccagtctccatccagtctgtctgcatcccttggagacacaattaccatcacttgccatgccagtcagaacataaatgtttggttaagctggtaccagcagaaaccaggaaatattcctaaactattgatctataaggcttccaacttgcacacaggcgtcccatcaaggtttagtggcagtggatctggaacaggtttcacattaaccatcagcagcctgcagcctgaagacattgccacttactactgtcaacagggtcaaagttatccattcacgttcggctcggggacaaagttggaaataaaa

SEQ ID NO: 305 - protein, 107 aa, Mus musculus
DIQMNQSPSSLSASLGDTITITCHASQNINVWLSWYQQKPGNIPKLLIYKASNLHTGVPSRFSGSGSGTGFTLTISSLQPEDIATYYCQQGQSYPFTFGSGTKLEIK

SEQ ID NO: 306 - DNA, 348 bp, Mus musculus
  misc_feature (1)..(348): SC16.126 VH
  CDS (1)..(348)
caggtgcagatgaaggagtcaggacctggcctggtggcgccctcacagagcctgtccatcacttgcactgtctctgggtcttcattaaccaactatggtgtacactgggttcgccagcctccaggaaagggtctagagtggctgggagtaatatgggctggtggaagcacaaattataattcggctctcatgtccagactgagtatcagcaaagacaactccaagagccaagttttcttaaaaatgaacagtctgcaaactgatgacacagccatgtactactgtgccagagactgggagggctggtttgcttactggggccaagggactctggtcactgtctctgca

SEQ ID NO: 307 - protein, 116 aa, Mus musculus
QVQMKESGPGLVAPSQSLSITCTVSGSSLTNYGVHWVRQPPGKGLEWLGVIWAGGSTNYNSALMSRLSISKDNSKSQVFLKMNSLQTDDTAMYYCARDWEGWFAYWGQGTLVTVSA

SEQ ID NO: 308 - DNA, 321 bp, Mus musculus
  misc_feature (1)..(321): SC16.129 VL
  CDS (1)..(321)
gacattcagatgacccagtctcctgcctcccagtctgcatctctgggagaaagtgtcaccatcacatgcctggcaagtcagaccattggtacatggttagcatggtatcagcagaaaccagggaaatctcctcagctcctgatttatgctgcaaccagcttggcagatggggtcccatcaaggttcagtggtagtggatctggcacaaaattttctttcaagatcagcagcctacaggctgaagattttgtaagttattactgtcaacaactttacagtactccgtacacgttcggaggggggaccaagctggaaataaaa

SEQ ID NO: 309 - protein, 107 aa, Mus musculus
DIQMTQSPASQSASLGESVTITCLASQTIGTWLAWYQQKPGKSPQLLIYAATSLADGVPSRFSGSGSGTKFSFKISSLQAEDFVSYYCQQLYSTPYTFGGGTKLEIK

SEQ ID NO: 310 - DNA, 348 bp, Mus musculus
  misc_feature (1)..(348): SC16.129 VH
  CDS (1)..(348)
caggtgcagctaaaggagtcaggacctggcctggtggcgccctcacagagcctgtccatcacatgcactgtctcagggttctcattaaccgactatggtgtaagctggattcgccagcctccaggaaagggtctggagtggctgggagtaatatggggtggtggaagcacatactataattcagctctcaaatccagactgagcatcagcaaggacaactccaagagccaagttttcttagaactgaacagtctgcaaactgatgacacagccatttactactgtgccaaacattatggtcactacgctgcttactggggccaagggactctggtcactgtctctgca

SEQ ID NO: 311 - protein, 116 aa, Mus musculus
QVQLKESGPGLVAPSQSLSITCTVSGFSLTDYGVSWIRQPPGKGLEWLGVIWGGGSTYYNSALKSRLSISKDNSKSQVFLELNSLQTDDTAIYYCAKHYGHYAAYWGQGTLVTVSA

SEQ ID NO: 312 - DNA, 321 bp, Mus musculus
  misc_feature (1)..(321): SC16.130 VL
  CDS (1)..(321)
gacatccagttgactcagtctccagcctccctatctgcatctgtgggagaaactgtcaccatcacatgtcgagcaagtgggagtattcacaattatttagcatggtatcagcagaaacagggaaagtctcctcagctcctggtctataatgcaaaaaccttagtagatggtgtgccatcaaggttcagtggcagtggatcaggaacacaatattctctcaagatcaacagcctgcagcctgaagattttgggtattattactgtcaacatttttggactactccgtggacattcggtggaggcaccaagctggaaatcaaa

SEQ ID NO: 313 - protein, 107 aa, Mus musculus
DIQLTQSPASLSASVGETVTITCRASGSIHNYLAWYQQKQGKSPQLLVYNAKTLVDGVPSRFSGSGSGTQYSLKINSLQPEDFGYYYCQHFWTTPWTFGGGTKLEIK

SEQ ID NO: 314 - DNA, 360 bp, Mus musculus
  misc_feature (1)..(360): SC16.130 VH
  CDS (1)..(360)
gaggtccagctgcagcagtctggacctgagctggtaaagcctggggcttcagtgaagatgtcctgcaaggcttctggatacacattcactagctatgttatgcactgggtgaagcagaagcctgggcagggccttgagtggattggatatattaatccttacaatgatggtactgagtacaatgagaagttcaaaggcaaggccacactgacttcagacaaatcctccagcacagcctacatggagctcagcagcctgacctctgaggactctgcggtctattactgtgcaagaggggtctatgatggttactcttactttgactactggggccaaggcaccactctcacagtctcctca

SEQ ID NO: 315 - protein, 120 aa, Mus musculus
EVQLQQSGPELVKPGASVKMSCKASGYTFTSYVMHWVKQKPGQGLEWIGYINPYNDGTEYNEKFKGKATLTSDKSSSTAYMELSSLTSEDSAVYYCARGVYDGYSYFDYWGQGTTLTVSS

SEQ ID NO: 316 - DNA, 321 bp, Mus musculus; identical to SEQ ID NO: 272
  misc_feature (1)..(321): SC16.131 VL
  CDS (1)..(321)

SEQ ID NO: 317 - protein, 107 aa, Mus musculus; identical to SEQ ID NO: 273

SEQ ID NO: 318 - DNA, 351 bp, Mus musculus; identical to SEQ ID NO: 274
  misc_feature (1)..(351): SC16.131 VH
  CDS (1)..(351)

SEQ ID NO: 319 - protein, 117 aa, Mus musculus; identical to SEQ ID NO: 275

SEQ ID NO: 320 - DNA, 321 bp, Mus musculus
  misc_feature (1)..(321): SC16.132 VL
  CDS (1)..(321)
gacattcagatgacccagtctcctgcctcccagtctgcatctctgggagaaagtgtcaccatcacatgcctggcaagtcagaccattggtacatggttagcatggtatcagcagaaaccagggaaatctcctcagctcctgatttatgctgcaaccagcttggcagatggggtcccatcaaggttcagtggtagtggatctggcacaaaattttctttcaagatcagcagcctacaggctgaagattttgtaagttattactgtcaacaactttacagtactccgtggacgttcggtggaggcaccaagctggagatcaaa

SEQ ID NO: 321 - protein, 107 aa, Mus musculus
DIQMTQSPASQSASLGESVTITCLASQTIGTWLAWYQQKPGKSPQLLIYAATSLADGVPSRFSGSGSGTKFSFKISSLQAEDFVSYYCQQLYSTPWTFGGGTKLEIK

SEQ ID NO: 322 - DNA, 348 bp, Mus musculus
  misc_feature (1)..(348): SC16.132 VH
  CDS (1)..(348)
caggtgcagctgaaggagtcaggacctggcctggtggcgccctcacagagcctgtccatcacatgcactgtctcagggttctcattaaccgactatggtgtaagctggattcgccagcctccaggaaagggtctggagtggctgggagtagtatggggtggtggaagcacatactataattccgctctcaaatccagactgagcatcaccaaggacaactccaagagccaagttttcttaaaaatgaacagtctgcaaactgatgacacagccatgtactactgtgccaaacagaggggtcagtacggggcttactggggccaagggactctggtcactgtctctgca

SEQ ID NO: 323 - protein, 116 aa, Mus musculus
QVQLKESGPGLVAPSQSLSITCTVSGFSLTDYGVSWIRQPPGKGLEWLGVVWGGGSTYYNSALKSRLSITKDNSKSQVFLKMNSLQTDDTAMYYCAKQRGQYGAYWGQGTLVTVSA

SEQ ID NO: 324 - DNA, 321 bp, Mus musculus
  misc_feature (1)..(321): SC16.133 VL
  CDS (1)..(321)
agtattgtgatgacccagactcccaaattcctgcttgtttcagcaggagacagggttaccataacctgcaaggccagtcagagtgtgagtaatgatgtagcttggtaccaacagaagccagggcagtctcctaaactgctgatatactgtgcatccaatcgctacactggagtccctgatcgcttcactggcagtggatatgggacggatttcactttcaccatcagcactgtgcaggctgaagacctggcagtttatttctgtcagcaggattatagctctccgctcacgttcggtgctgggaccaagctggagctgaaa

SEQ ID NO: 325 - protein, 107 aa, Mus musculus
SIVMTQTPKFLLVSAGDRVTITCKASQSVSNDVAWYQQKPGQSPKLLIYCASNRYTGVPDRFTGSGYGTDFTFTISTVQAEDLAVYFCQQDYSSPLTFGAGTKLELK

SEQ ID NO: 326 - DNA, 357 bp, Mus musculus
  misc_feature (1)..(357): SC16.133 VH
  CDS (1)..(357)
caggtgcagctgaaggagtcaggacctggcctggtggcgccctcacagagcctgtccatcacctgcacagtctctggtttctcattaaccaactatgctgtacactgggttcgccagtctccaggaaagggtctggagtggctgggagtgatatggagtgatggaagcacagactataatgcagctttcatatctagactgagcatcagcaaggacaactccaagagccaagttttctttaagatgaacagtctgcaagctgatgacacagccatgtactactgtgcccgaaagaaaggaggatggtttccctggtttgcttactggggccaagggactctggtcactgtctctgca

SEQ ID NO: 327 - protein, 119 aa, Mus musculus
QVQLKESGPGLVAPSQSLSITCTVSGFSLTNYAVHWVRQSPGKGLEWLGVIWSDGSTDYNAAFISRLSISKDNSKSQVFFKMNSLQADDTAMYYCARKKGGWFPWFAYWGQGTLVTVSA

SEQ ID NO: 328 - DNA, 333 bp, Mus musculus
  misc_feature (1)..(333): SC16.134 VL
  CDS (1)..(333)
gacattgtgctgacccaatctccagcttctttggctgtgtctctagggcagagggccaccatctcctgcaaggccagccaaagtgttgatcatgctggtgatagttatatgaactggtaccaacagaaaccaggacagccacccaaactcctcatctatgctgcatccaatctagaatctgggatcccagccaggtttagtggcagtgggtctgggacagacttcaccctcaacatccatcctgtggaggaggaggatgctgcaacctattactgtcagcaaagtaatgaggatccgtacacgttcggaggggggaccaagctggaaatcaaa

SEQ ID NO: 329 - protein, 111 aa, Mus musculus
DIVLTQSPASLAVSLGQRATISCKASQSVDHAGDSYMNWYQQKPGQPPKLLIYAASNLESGIPARFSGSGSGTDFTLNIHPVEEEDAATYYCQQSNEDPYTFGGGTKLEIK

SEQ ID NO: 330 - DNA, 351 bp, Mus musculus
  misc_feature (1)..(351): SC16.134 VH
  CDS (1)..(351)
gaggtccagctgcagcagtctggacctgacctggtgaagcctggggcttcagtgaagatatcctgcaaggcttctggttactcattcactggctactacatgcactgggtgaagcagagccatggaaagaggcttgagtggattggacgtgttaatcctaacaatggtggtactaactacaaccagaaattcaagggcaaggccatattaactgtagacaagtcatccagcacagcctacatggagctccgcagcctgacatctgaggactctgcggtctattactgtgcaagagggagttatgataacgccgagggctggggccaagggactctggtcactgtctctgca

SEQ ID NO: 331 - protein, 117 aa, Mus musculus
EVQLQQSGPDLVKPGASVKISCKASGYSFTGYYMHWVKQSHGKRLEWIGRVNPNNGGTNYNQKFKGKAILTVDKSSSTAYMELRSLTSEDSAVYYCARGSYDNAEGWGQGTLVTVSA

SEQ ID NO: 332 - DNA, 321 bp, Mus musculus
  misc_feature (1)..(321): SC16.135 VL
  CDS (1)..(321)
gacatcaagatgacccagtctccatcttccatgtatgcatctctaggagagagagtcactatcacttgcaaggcgagtcaggacattaataggtatttaagctggttccagcagaaaccagggaaatctcctaagaccctgatctatcgtgcaaacagattggtagatggggtcccatcaaggttcagtggcagtggatctgggcaagattattctctcaccatcagcagcctggagtatgaagatatgggaatttattattgtctacagtatgatgagtttccattcacgttcggctcggggacaaagttggaaataaaa

SEQ ID NO: 333 - protein, 107 aa, Mus musculus
DIKMTQSPSSMYASLGERVTITCKASQDINRYLSWFQQKPGKSPKTLIYRANRLVDGVPSRFSGSGSGQDYSLTISSLEYEDMGIYYCLQYDEFPFTFGSGTKLEIK

SEQ ID NO: 334 - DNA, 363 bp, Mus musculus
  misc_feature (1)..(363): SC16.135 VH
  CDS (1)..(363)
caggtccagttgcagcagtctggagctgagctggtaaggcctgggacttcagtgaaggtgtcctgcaaggcttctggatacgccttcactaattacttgatagagtgggtaaagcagaggcctggacagggccttgagtggattggggtgattaatcctggaagtggtggtactaactccaatgagaagttcaaggccaaggcaacactgactgcagacaaatcctccagcactgcctacatgcagctcagcagcctgacatctgctgactctgcggtctatttctgtgcaagatcggactatgattacgccttctatgctatggactactggggtcaaggaacctcagtcaccgtctcctca

SEQ ID NO: 335 - protein, 121 aa, Mus musculus
QVQLQQSGAELVRPGTSVKVSCKASGYAFTNYLIEWVKQRPGQGLEWIGVINPGSGGTNSNEKFKAKATLTADKSSSTAYMQLSSLTSADSAVYFCARSDYDYAFYAMDYWGQGTSVTVSS

SEQ ID NO: 336 - DNA, 321 bp, Mus musculus
  misc_feature (1)..(321): SC16.136 VL
  CDS (1)..(321)
gacatccagatgactcagtctccagcctccctatctgcatctgtgggagaaactgtcaccatcacatgtcgagcaagtgggaatattcacaattatttagcatggtatcagcagaaacagggaaaatctcctcacctcctggtctataatgcaaaaaccttagcagatggtgtgccatcaaggttcagtggcagtggatcaggaacacaatattctctcaagatcaacagcctgcagcctgaagattttgggagttattactgtcaacatttttggagtactccgtggacgttcggtggaggcaccaagctggaaatcaaa

SEQ ID NO: 337 - protein, 107 aa, Mus musculus
DIQMTQSPASLSASVGETVTITCRASGNIHNYLAWYQQKQGKSPHLLVYNAKTLADGVPSRFSGSGSGTQYSLKINSLQPEDFGSYYCQHFWSTPWTFGGGTKLEIK

SEQ ID NO: 338 - DNA, 366 bp, Mus musculus
  misc_feature (1)..(366): SC16.136 VH
  CDS (1)..(366)
gaggtccagctgcagcagtctggacctgagctggtaaagcctggggcttcagtgaagatgtcctgcaaggcttctggatacacattcactagctatgttatgcactgggtgaagcagaagcctgggcagggccttgagtggattggatatattaatccttacaatgatggtactaagtacaatgagaagttcaaaggcaaggccacactgacttcagacaaatcctccagcacagcctacatggagctcagcagcctgacctctgaggactctgcggtctattactgtgcaagagacaggtcgggctacgaagattactatggtatggactactggggtcaaggaacctcagtcaccgtctcctca

SEQ ID NO: 339 - protein, 122 aa, Mus musculus
EVQLQQSGPELVKPGASVKMSCKASGYTFTSYVMHWVKQKPGQGLEWIGYINPYNDGTKYNEKFKGKATLTSDKSSSTAYMELSSLTSEDSAVYYCARDRSGYEDYYGMDYWGQGTSVTVSS

SEQ ID NO: 340 - DNA, 318 bp, Mus musculus
  misc_feature (1)..(318): SC16.137 VL
  CDS (1)..(318)
caaattgttctcacccagtctccagcaatcatgtctgcatctctaggggaggagatcaccctaacctgcagtgccagctcgagtgtaagttacatgcactggtaccagcagaagtcaggcacttctcccaaactcttgatttatagcacatccaacctggcttctggagtcccttctcgcttcagtggcagtgggtctgggaccttttattctctcacaatcagcagtgtggaggctgaagatgctgccgattattactgccatcagtggagtagttatcacacgttcggaggggggaccaagctggaaataaaacgg

SEQ ID NO: 341 - protein, 106 aa, Mus musculus
QIVLTQSPAIMSASLGEEITLTCSASSSVSYMHWYQQKSGTSPKLLIYSTSNLASGVPSRFSGSGSGTFYSLTISSVEAEDAADYYCHQWSSYHTFGGGTKLEIKR

SEQ ID NO: 342 - DNA, 351 bp, Mus musculus
  misc_feature (1)..(351): SC16.137 VH
  CDS (1)..(351)
gaggtgcagctggtggagtctgggggagacttagtgaagcctggagggtccctgaaactctcctgtgcagcctctggattcactttcagtagctatggcatgtcttgggttcgccagactccagacaagaggctggagtgggtcgcaaccattagtagtggtggtagttacacctactatccagacagtgtgaaggggcgattcaccatctccagagacaatgccaagaacaccctgtacctgcaaatgagcagtctgaagtctgaggacacagccatgtattactgtgcaagacgaagagccgatgctatggactactggggtcaaggaacctcagtcaccgtctcctca

SEQ ID NO: 343 - protein, 117 aa, Mus musculus
EVQLVESGGDLVKPGGSLKLSCAASGFTFSSYGMSWVRQTPDKRLEWVATISSGGSYTYYPDSVKGRFTISRDNAKNTLYLQMSSLKSEDTAMYYCARRRADAMDYWGQGTSVTVSS

SEQ ID NO: 344 - DNA, 321 bp, Mus musculus
  misc_feature (1)..(321): SC16.138 VL
  CDS (1)..(321)
gacattcagatgacccagtctcctgcctcccagtctgcatctctgggagaaagtgtcaccatcacatgcctggcaagtcagaccattggtacatggttagcatggtatcagcagaaaccagggaaatctcctcagctcctgatttattctgcaaccagcttggcagatggggtcccatcaaggttcagtggtagtggatctggcacaaaattttctttcaagatcagcagcctacaggctgaagattttgtaagttattactgtcaacaactttacagtactccgtggacgttcggtggaggcaccaagctggaaatcaaa

SEQ ID NO: 345 - protein, 107 aa, Mus musculus
DIQMTQSPASQSASLGESVTITCLASQTIGTWLAWYQQKPGKSPQLLIYSATSLADGVPSRFSGSGSGTKFSFKISSLQAEDFVSYYCQQLYSTPWTFGGGTKLEIK

SEQ ID NO: 346 - DNA, 348 bp, Mus musculus
  misc_feature (1)..(348): SC16.138 VH
  CDS (1)..(348)
caggtgcagctgaaggagtcaggacctggcctggtggcgccctcacagagcctgtccatcacatgcactgtctcagggttctcattaaccgactatggtgtaagctggattcgccagcctccaggaaagggtctggagtggctgggagtagtatggggtggtggaagcacatactataattccgctctcaaatccagactgagcatcagcaaggacaactccaagagccaagttttcttaaaaatgaacagtctgcaaactgatgacacagccatgtactactgtgccaaacagaggggtcagtacggggcttactggggccaagggactctggtcactgtctctgca

SEQ ID NO: 347 - protein, 116 aa, Mus musculus
QVQLKESGPGLVAPSQSLSITCTVSGFSLTDYGVSWIRQPPGKGLEWLGVVWGGGSTYYNSALKSRLSISKDNSKSQVFLKMNSLQTDDTAMYYCAKQRGQYGAYWGQGTLVTVSA

SEQ ID NO: 348 - DNA, 321 bp, Mus musculus
  misc_feature (1)..(321): SC16.139 VL
  CDS (1)..(321)
gacattgtgatgacccagtctcacaaattcatgtccacatcagtaggagacagggtcagcatcacctgcaaggccagtcaggatgtgaatactgctgtaggctggtatcaacagaaaccaggacaatctcctaaactactgatttactcggcatcctaccggtacactggagtccctgatcgcttcactggcagtggatctgggacggatttcactttcaccatcagcagtgtgcaggctgaagacctggcagtttattactgtcagcaacattatagtagtccgtacacgttcggaggggggaccaagctggaaattaaa

SEQ ID NO: 349 - protein, 107 aa, Mus musculus
DIVMTQSHKFMSTSVGDRVSITCKASQDVNTAVGWYQQKPGQSPKLLIYSASYRYTGVPDRFTGSGSGTDFTFTISSVQAEDLAVYYCQQHYSSPYTFGGGTKLEIK

SEQ ID NO: 350 - DNA, 357 bp, Mus musculus; identical to SEQ ID NO: 238
  misc_feature (1)..(357): SC16.139 VH
  CDS (1)..(357)

SEQ ID NO: 351 - protein, 119 aa, Mus musculus; identical to SEQ ID NO: 239

SEQ ID NO: 352 - DNA, 333 bp, Mus musculus
  misc_feature (1)..(333): SC16.140 VL
  CDS (1)..(333)
gacattgtgctgacacagtctcttgcttccttagctgtatctctggggcagagggccaccatctcatgcagggccagcaaaagtgtcagtacatctggctatagttatatgcactggtaccaacagaaaccaggacagccacccaaactcctcatttatcttgcatccaacctagaatctggggtccctgccaggttcagtggcagtgggtctgggacagacttcaccctcaacatccatcctgtggaagacgaagatgctgcaacctattactgtcagcacagtagggagcttccgttcacgttcggaggggggaccaagctggaaataaag

SEQ ID NO: 353 - protein, 111 aa, Mus musculus
DIVLTQSLASLAVSLGQRATISCRASKSVSTSGYSYMHWYQQKPGQPPKLLIYLASNLESGVPARFSGSGSGTDFTLNIHPVEDEDAATYYCQHSRELPFTFGGGTKLEIK

SEQ ID NO: 354 - DNA, 348 bp, Mus musculus
  misc_feature (1)..(348): SC16.140 VH
  CDS (1)..(348)
caggtccaactgcagcagtctgggcctgagctggtgaggcctggggcttcagtgaagatgtcctgcaaggcttcaggctataccttcaccagctactggatgcactgggtgaaacagaggcctggacaaggccttgagtggattggcatgattgatccttccaatagtgaaactaggttaaatcagaagttcaaggacaaggccacattgaatgtagacaaatcctccaacacagcctacatgcagctcagcagcctgacatctgaggactctgcagtctattactgtgcagtaatggactactactttgactactggggccaaggcaccactctcacagtctcctca

SEQ ID NO: 355 - protein, 116 aa, Mus musculus
QVQLQQSGPELVRPGASVKMSCKASGYTFTSYWMHWVKQRPGQGLEWIGMIDPSNSETRLNQKFKDKATLNVDKSSNTAYMQLSSLTSEDSAVYYCAVMDYYFDYWGQGTTLTVSS

SEQ ID NO: 356 - DNA, 321 bp, Mus musculus; identical to SEQ ID NO: 232
  misc_feature (1)..(321): SC16.141 VL
  CDS (1)..(321)

SEQ ID NO: 357 - protein, 107 aa, Mus musculus; identical to SEQ ID NO: 233

SEQ ID NO: 358 - DNA, 345 bp, Mus musculus; identical to SEQ ID NO: 234
  misc_feature (1)..(345): SC16.141 VH
  CDS (1)..(345)

SEQ ID NO: 359 - protein, 115 aa, Mus musculus; identical to SEQ ID NO: 235

SEQ ID NO: 360 - DNA, 321 bp, Mus musculus
  misc_feature (1)..(321): SC16.142 VL
  CDS (1)..(321)
gacatcaagatgacccagtctccatcttccatgtatgcatctctaggagagagagtcactatcacttgcaaggcgagtcaggacattaataattatttaagctggttccagcagaaaccagggaaatctcctaagaccctgatctatcgtgcaaacagattggtagatggggtcccatcaaggttcagtggcagtggatctgggcaagattattctctcaccatcagcagcctggagtatgaagatatgggaatttattattgtctacagtatgatgagtttccgtacacgttcggaggggggaccaagctggaaataaaa

SEQ ID NO: 361 - protein, 107 aa, Mus musculus
DIKMTQSPSSMYASLGERVTITCKASQDINNYLSWFQQKPGKSPKTLIYRANRLVDGVPSRFSGSGSGQDYSLTISSLEYEDMGIYYCLQYDEFPYTFGGGTKLEIK

SEQ ID NO: 362 - DNA, 345 bp, Mus musculus
  misc_feature (1)..(345): SC16.142 VH
  misc_feature (336)..(336): The 'v' at position 336 may be a or g or c
  misc_feature (339)..(339): The 'n' at position 339 may be a or g or c or t
  misc_feature (342)..(342): The 'n' at position 342 may be a or g or c or t
  misc_feature (345)..(345): The 'n' at position 345 may be a or g or c or t
  CDS (1)..(345)
gaggtccagcttcagcagtcaggacctgagctggtgaaacctggggcctcagtgaagatatcctgcaaggcttctggatacacattcactgactacaacatgcactgggtgaagcagagccatggaaagagccttgagtggattggattcttttatccttacaacggtaatactgtctacagccagaagttcaagagcaaggccacattgactgtagacaattcctccagcacagcctacatggagctccgcagcctgacatctgaggactctgcagtctattactgtgcaagacttaactgggagggctactggggccaaggcaccaccctcacvgtntcntcn

SEQ ID NO: 363 - protein, 115 aa, Mus musculus
  misc_feature (112)..(112): The 'Xaa' at location 112 stands for Thr.
  misc_feature (114)..(114): The 'Xaa' at location 114 stands for Ser.
  misc_feature (115)..(115): The 'Xaa' at location 115 stands for Ser.
EVQLQQSGPELVKPGASVKISCKASGYTFTDYNMHWVKQSHGKSLEWIGFFYPYNGNTVYSQKFKSKATLTVDNSSSTAYMELRSLTSEDSAVYYCARLNWEGYWGQGTTLXVXX

SEQ ID NO: 364 - DNA, 336 bp, Mus musculus
  misc_feature (1)..(336): SC16.143 VL
  CDS (1)..(336)
gatgttttgatgacccaaactccactctccctgcctgtcagtcttggagatcaagcctccatctcttgcagatctagtcagagcattgtacatagtaatggaaacacctatttagaatggtacctgcagaaaccaggccagtctccaaagctcctgatctacaaagtttccaaccgattttctggggtcccagacaggttcagtggcagtggatcagggacagatttcacactcaagatcagcagagtggaggctgaggatctgggagtttattactgctttcaaggttcacatgttccgctcacgttcggtgctgggaccaagctggagctgaaa

SEQ ID NO: 365 - protein, 112 aa, Mus musculus
DVLMTQTPLSLPVSLGDQASISCRSSQSIVHSNGNTYLEWYLQKPGQSPKLLIYKVSNRFSGVPDRFSGSGSGTDFTLKISRVEAEDLGVYYCFQGSHVPLTFGAGTKLELK

SEQ ID NO: 366 - DNA, 357 bp, Mus musculus
  misc_feature (1)..(357): SC16.143 VH
  CDS (1)..(357)
caggtccagctgcagcagtctggacctgagctggtgaagcctggggcttcagtgaggatatcctgcaaggcttctggctacaccttcacaagctactatatacactgggtgaagcagaggcctggacagggacttgagtggattggatggatttatcctggaaatggtaatactaagtacaatgagaagttcaagggcaaggccacactgactgcagacaaatcctccagcacagcctacatgcagatcagcagcctgacctctgaggactctgcggtctatttctgtgcaagagagagatggttactactatggtttgcttactggggccaagggactctggtcactgtctctgca

SEQ ID NO: 367 - protein, 119 aa, Mus musculus
QVQLQQSGPELVKPGASVRISCKASGYTFTSYYIHWVKQRPGQGLEWIGWIYPGNGNTKYNEKFKGKATLTADKSSSTAYMQISSLTSEDSAVYFCARERWLLLWFAYWGQGTLVTVSA

SEQ ID NO: 368 - DNA, 321 bp, Mus musculus
  misc_feature (1)..(321): SC16.144 VL
  CDS (1)..(321)
agtattgtgatgacccagactcccaaattcctgcttgtatcagcaggagacagggttaccataacctgcaaggccagtcagagtgtgagtaatgatgtaggttggtaccaacagaagccagggcagtctcctaaactgctgatatactatgcatccaatcgctacaatggagtccctgatcgcttcactggcagtggatatgggacggatttcactttcaccatcagcactgtgcaggctgaagacctggcagtttatttctgtcagcaggattatagctctccgtggacgttcggtggaggcaccaagctggaaatcaaa

SEQ ID NO: 369 - protein, 107 aa, Mus musculus
SIVMTQTPKFLLVSAGDRVTITCKASQSVSNDVGWYQQKPGQSPKLLIYYASNRYNGVPDRFTGSGYGTDFTFTISTVQAEDLAVYFCQQDYSSPWTFGGGTKLEIK

SEQ ID NO: 370 - DNA, 354 bp, Mus musculus
  misc_feature (1)..(354): SC16.144 VH
  CDS (1)..(354)
cagatccagttggtgcagtctggacctgagctgaagaagcctggagagacagtcaagatctcctgcaaggcttctgggtataccttcacaaactatggaatgaactgggtgaagcaggctccaggaaagggtttaaagtgggtgggctggataaacacctacactggagagccaacatatgctgatgacttcaagggacggtttgccttctctttggaaacctctgccagcactgcctatttgcagatcgacaacctcaaaaatgaggacacggctacatatttctgtgcaagagtgggggattacgtcggctttgactactggggccaaggcaccactctcacagtctcctca

SEQ ID NO: 371 - protein, 118 aa, Mus musculus
QIQLVQSGPELKKPGETVKISCKASGYTFTNYGMNWVKQAPGKGLKWVGWINTYTGEPTYADDFKGRFAFSLETSASTAYLQIDNLKNEDTATYFCARVGDYVGFDYWGQGTTLTVSS

SEQ ID NO: 372 - DNA, 321 bp, Mus musculus
  misc_feature (1)..(321): SC16.147 VL
  CDS (1)..(321)
gatatccagatgacacagactgcatcctccctgtctgcctctctgggagacagagtcaccatcagttgcagggcaagtcaggacattaacaattatttaaactggtatcagcagaaaccagatggaactgttaaactcctgatctactacacatcaagattacactcaggagtcccatcaaggttcagtggcagtgggtctggaacagattattctctcaccattagcatcctggaacaagaagatattgccacttacttttgccaacagggtgatacgcttccgtggacgttcggtggaggcaccaagctggaaatcaaa

SEQ ID NO: 373 - protein, 107 aa, Mus musculus
DIQMTQTASSLSASLGDRVTISCRASQDINNYLNWYQQKPDGTVKLLIYYTSRLHSGVPSRFSGSGSGTDYSLTISILEQEDIATYFCQQGDTLPWTFGGGTKLEIK

SEQ ID NO: 374 - DNA, 351 bp, Mus musculus
  misc_feature (1)..(351): SC16.147 VH
  CDS (1)..(351)
cagatccagttggtgcagtctggacctgagctgacgaagcctggagagacagtcaagatctcctgcaaggcctctggatataccttcacagactattcattgcactgggtgaagcaggctctaggaaagggtttaaagtggatgggctggataaacactgagactggtgagccagcatatgcagatgacttcaagggacggtttgccttctctttggaaacctctgccagcactgcctatttgcagatcaacgacctcaaaaatgaggacacgactacatatttctgtggtatttacgacgggtatgctatggactactggggtcaaggaacctcagtcaccgtctcctca

SEQ ID NO: 375 - protein, 117 aa, Mus musculus
QIQLVQSGPELTKPGETVKISCKASGYTFTDYSLHWVKQALGKGLKWMGWINTETGEPAYADDFKGRFAFSLETSASTAYLQINDLKNEDTTTYFCGIYDGYAMDYWGQGTSVTVSS

SEQ ID NO: 376 - DNA, 318 bp, Mus musculus
  misc_feature (1)..(318): SC16.148 VL
  CDS (1)..(318)
caaattgttctcacccagtctccagcaatcatgtctgcatctccaggggagaaggtcaccatgacctgcagtgccagctcaagtgtaagttacatgtactggtaccagcagaagccaggatcctcccccagactcctgatttatgacacatccaacctggcttctggagtccctgttcgcttcagtggcagtgggtctgggacctcttactctctcacaatcagccgaatggaggctgaagatactgccacttattattgccaggagtggagtaataatccgctcacgttcggtgatgggaccaagctggagctgaaa

SEQ ID NO: 377 - protein, 106 aa, Mus musculus
QIVLTQSPAIMSASPGEKVTMTCSASSSVSYMYWYQQKPGSSPRLLIYDTSNLASGVPVRFSGSGSGTSYSLTISRMEAEDTATYYCQEWSNNPLTFGDGTKLELK

SEQ ID NO: 378 - DNA, 354 bp, Mus musculus
  misc_feature (1)..(354): SC16.148 VH
  CDS (1)..(354)
cagatccagttggtgcagtctggacctgagctgaagaagcctggagagacagtcaagatctcctgcaaggcttctgggtataccctcacaaactatggaatgaactgggtgaagcaggctccaggaaagggtttaaagtggatgggctggataaacacctacactggagagccaacatatgctgatgacttcaagggacggtttgccttctctttggaaacctctgccaggattgtctatttgcagatcaacaacctcaaaaatgaggacacggctacatatttctgtgcaaaatatgaggcccacgaggggtttgtttattggggccaagggactctggtcactgtctctgca

SEQ ID NO: 379 - protein, 118 aa, Mus musculus
QIQLVQSGPELKKPGETVKISCKASGYTLTNYGMNWVKQAPGKGLKWMGWINTYTGEPTYADDFKGRFAFSLETSARIVYLQINNLKNEDTATYFCAKYEAHEGFVYWGQGTLVTVSA

SEQ ID NO: 380 - DNA, 321 bp, Mus musculus
  misc_feature (1)..(321): SC16.149 VL
  CDS (1)..(321)
gacatccagatgaaccagtctccatccagtctgtctgcatcccttggagacacaattaccatcacttgccatgccagtcagaacattaatgtttggttaagctggtaccagcagaaaccaggaaatattccaaaactattgatctataaggcttcccacttgcacacaggcgtcccatcaaggttgagtggcagtggatctggaacaggtttcacattaaccatcagcagcctgcagcctgaagacattgccacttactactgtcaacagggtcaaagttatccattcacgttcggctcggggacaacgttggaaataaaa

SEQ ID NO: 381 - protein, 107 aa, Mus musculus
DIQMNQSPSSLSASLGDTITITCHASQNINVWLSWYQQKPGNIPKLLIYKASHLHTGVPSRLSGSGSGTGFTLTISSLQPEDIATYYCQQGQSYPFTFGSGTTLEIK

SEQ ID NO: 382 - DNA, 348 bp, Mus musculus
  misc_feature (1)..(348): SC16.149 VH
  CDS (1)..(348)
caggtgcagctgaaggagtcaggacctggcctggtggcgccctcacagagcctgtccatcacttgcgctgtctctgggttttcattaaccagctttggtgtacactgggttcgccagcctccaggaaagggtctggagtggctgggagttatatgggctggtggaagcacaaattattattcggctctcatgtccagactgagcatcagcatagacaactccaagagccaagttttcttaaagatgaacagtctgcaaactgatgacacagccatgtactactgtgccagagactgggagggctggtttgcttactggggccaagggactctggtcactgtctctgca

SEQ ID NO: 383 - protein, 116 aa, Mus musculus
QVQLKESGPGLVAPSQSLSITCAVSGFSLTSFGVHWVRQPPGKGLEWLGVIWAGGSTNYYSALMSRLSISIDNSKSQVFLKMNSLQTDDTAMYYCARDWEGWFAYWGQGTLVTVSA

SEQ ID NO: 384 - DNA, 339 bp, Mus musculus
  misc_feature (1)..(339): SC16.150 VL
  CDS (1)..(339)
gacattgtgatgtcacagtctccatcctccctaactgtgtcagttggagagaaggttactatgagctgcatgtccagtcagagccttttatatagtagcactcaaaagaactacttggcctggtaccagcagaaaccagggcagtctcctaaactgctgatttactgggcatccactagggaatctggggtccctgatcgcttcacaggcagtggatctgggacagatttcactctcaccatcagcagtgtgaaggctgaagacctggcagtttattactgtcagcaatattatagctatccgtacacgttcggaggggggaccaagctggaaataaaa

SEQ ID NO: 385 - protein, 113 aa, Mus musculus
DIVMSQSPSSLTVSVGEKVTMSCMSSQSLLYSSTQKNYLAWYQQKPGQSPKLLIYWASTRESGVPDRFTGSGSGTDFTLTISSVKAEDLAVYYCQQYYSYPYTFGGGTKLEIK

SEQ ID NO: 386 - DNA, 351 bp, Mus musculus
  misc_feature (1)..(351): SC16.150 VH
  CDS (1)..(351)
gagatccagctgcagcagtctggacctgagctggtgaagcctggggcttcagtgaaggtatcctgcaaggcttctggttatgcattcactagctacaacatgtactgggtgagtcagagccatggaaagagccttgagtggattggatatattgatccttacaatggtggcactagctacaaccagaagttcaggggcaaggccacattgactgttgacaagtcctcaagcacagcctacatgcatctcaacagcctgacatctgaggactcggcagtctattattgtgcaagagagaactataggtactttgacttctggggccaaggcaccactctcacagtctcctca

SEQ ID NO: 387 - protein, 117 aa, Mus musculus
EIQLQQSGPELVKPGASVKVSCKASGYAFTSYNMYWVSQSHGKSLEWIGYIDPYNGGTSYNQKFRGKATLTVDKSSSTAYMHLNSLTSEDSAVYYCARENYRYFDFWGQGTTLTVSS

SEQ ID NO: 388 - DNA, 318 bp, Artificial Sequence
  Humanized antibody sequence
  misc_feature (1)..(318): HSC16.13 VL
  CDS (1)..(318)
gacatccagatgacccagtctccatcctccctgtctgcatctgtaggagacagagtcaccatcacttgcagtgcaagtagcagcgttagctatatgtattggtatcagcagaaaccagggaaagcccctaagctcctgatctacctcactagtaacttggcaagtggggtcccatcaaggttcagtggcagtggatctgggacagatttcactctcaccatcagcagtctgcaacctgaagattttgcaacttactactgtcaacagtggcgtagtaacccattcacgttcggccaggggacaaagttggaaataaaa

SEQ ID NO: 389 - protein, 106 aa, Artificial Sequence
  Synthetic Construct
DIQMTQSPSSLSASVGDRVTITCSASSSVSYMYWYQQKPGKAPKLLIYLTSNLASGVPSRFSGSGSGTDFTLTISSLQPEDFATYYCQQWRSNPFTFGQGTKLEIK

SEQ ID NO: 390 - DNA, 372 bp, Artificial Sequence
  Humanized antibody sequence
  misc_feature (1)..(372): HSC16.13 VH
  CDS (1)..(372)
cagatcaccttgaaggagtctggtcctacgctggtgaaacccacacagaccctcacgctgacctgcaccttctctgggttctcactcagcactagtggaatgggtgtgggctggatccgtcagcccccaggaaaggccctggagtggcttgcacacatttggtgggatgatgttaagcgctacagcccatctctgaagagcaggctcaccatcaccaaggacacctccaaaaaccaggtggtccttacaatgaccaacatggaccctgtggacacagccacatattactgtgcacgcatagtttcctttgataacgacgttgtctctgctatggactactggggtcaaggaaccctagtcaccgtctcctcc

SEQ ID NO: 391 - protein, 124 aa, Artificial Sequence
  Synthetic Construct
QITLKESGPTLVKPTQTLTLTCTFSGFSLSTSGMGVGWIRQPPGKALEWLAHIWWDDVKRYSPSLKSRLTITKDTSKNQVVLTMTNMDPVDTATYYCARIVSFDNDVVSAMDYWGQGTLVTVSS

SEQ ID NO: 392 - DNA, 321 bp, Artificial Sequence
  Humanized antibody sequence
  misc_feature (1)..(321): HSC16.15 VL
  CDS (1)..(321)
gccatccagttgacccagtctccatcctccctgtctgcatctgtaggagacagagtcaccatcacttgccgggcaagtgagaacatttattataatttagcctggtatcagcagaaaccagggaaagctcctaagctcctgatctatactgccaatagtttggaagatggggtcccatcaaggttcagcggcagtggatctgggacagatttcactctcaccatcagcagcctgcagcctgaagattttgcaacttatttttgtaaacaggcttatgacgttcctccgacgttcggtggaggcaccaagctggaaatcaaa

SEQ ID NO: 393 - protein, 107 aa, Artificial Sequence
  Synthetic Construct
AIQLTQSPSSLSASVGDRVTITCRASENIYYNLAWYQQKPGKAPKLLIYTANSLEDGVPSRFSGSGSGTDFTLTISSLQPEDFATYFCKQAYDVPPTFGGGTKLEIK

SEQ ID NO: 394 - DNA, 351 bp, Artificial Sequence
  Humanized antibody sequence
  misc_feature (1)..(351): HSC16.15 VH
  CDS (1)..(351)
caggtgcagctggtgcagtctggggctgaggtgaagaagcctggggcctcagtgaaggtttcctgcaaggcatctggatacaccttcaccaggtactggatacactggatacgacaggcccctggacaagggcttgagtggatgggatacatcaaccctacaactgtttatactgagttcaatcagaacttcaaggacagagtcaccatgaccagggacacgtccacgagcacagtctacatggagctgagcagcctgagatctgaggacacggccgtgtattactgtgcgagaggcggtagtaacttctttgactactggggccaaggcaccactgtcacagtctcctca

SEQ ID NO: 395 - protein, 117 aa, Artificial Sequence
  Synthetic Construct
QVQLVQSGAEVKKPGASVKVSCKASGYTFTRYWIHWIRQAPGQGLEWMGYINPTTVYTEFNQNFKDRVTMTRDTSTSTVYMELSSLRSEDTAVYYCARGGSNFFDYWGQGTTVTVSS

SEQ ID NO: 396 - DNA, 318 bp, Artificial Sequence
  Humanized antibody sequence
  misc_feature (1)..(318): HSC16.25 VL
  CDS (1)..(318)
gaaattgtgctgactcagtctccagactttcagtctgtgactccaaaggagaaagtcaccatcacctgcagtgccagtagcagtgtgagctacatgcactggtaccagcagaaaccagatcagtctccaaagctcctcatcaaggatagttccaaactcgcctcaggggtcccctcgaggttcagtggcagtggatctgggacagatttcaccctcaccatcaatagcctggaagctgaagatgctgcaacgtattactgtcagcagtggagtagtaacccgctcacgttcggtcaggggaccaagctggagatcaaa

SEQ ID NO: 397 - protein, 106 aa, Artificial Sequence
  Synthetic Construct
EIVLTQSPDFQSVTPKEKVTITCSASSSVSYMHWYQQKPDQSPKLLIKDSSKLASGVPSRFSGSGSGTDFTLTINSLEAEDAATYYCQQWSSNPLTFGQGTKLEIK

SEQ ID NO: 398 - DNA, 372 bp, Artificial Sequence
  Humanized antibody sequence
  misc_feature (1)..(372): HSC16.25 VH
  CDS (1)..(372)
cagatcaccttgaaggagtctggtcctacgctggtgaaacccacacagaccctcacgctgacctgcaccttctctgggttctcactcagcactagtggaatgggtgtgggctggatccgtcagcccccaggaaaggccctggagtggcttacagacatttggtgggatgataataagtactacaacccatctctgaagagcaggctcaccatcaccaaggacacctccaaaaaccaggtggtccttacaatgaccaacatggaccctgtggacacagccacatattactgtgcacgaagagttaactattattacgacccgtactatgctatggactactggggtcaaggaaccctagtcaccgtctcctca

SEQ ID NO: 399 - protein, 124 aa, Artificial Sequence
  Synthetic Construct
QITLKESGPTLVKPTQTLTLTCTFSGFSLSTSGMGVGWIRQPPGKALEWLTDIWWDDNKYYNPSLKSRLTITKDTSKNQVVLTMTNMDPVDTATYYCARRVNYYYDPYYAMDYWGQGTLVTVSS

SEQ ID NO: 400 - DNA, 321 bp, Artificial Sequence
  Humanized antibody sequence
  misc_feature (1)..(321): HSC16.34 VL
  CDS (1)..(321)
gacatccagatgacccagtctccatcctccctgtctgcatctgtaggagacagagtcaccatcacttgcaaggcgagtcagagcgttagcaatgatgtagcctggtatcagcagaaaccagggaaagttcctaagctcctgatctattatgcatccaataggtactcaggggtcccatctcggttcagtggcagtggatctgggacagatttcactctcaccatcagcagcctgcagcctgaagatgttgcaacttatttctgtcagcaggattatagctctccgtggacgttcggtggaggcaccaaggtggaaatcaaa

SEQ ID NO: 401 - protein, 107 aa, Artificial Sequence
  Synthetic Construct
DIQMTQSPSSLSASVGDRVTITCKASQSVSNDVAWYQQKPGKVPKLLIYYASNRYSGVPSRFSGSGSGTDFTLTISSLQPEDVATYFCQQDYSSPWTFGGGTKVEIK

SEQ ID NO: 402 - DNA, 354 bp, Artificial Sequence
  Humanized antibody sequence
  misc_feature (1)..(354): HSC16.34 VH
  CDS (1)..(354)
caggtccagcttgtgcagtctggggctgaggtgaagaagcctggggcctcagtgaaggtttcctgcaaggcttctggatacaccttcactaactatggtatgaattgggtgcgccaggcccccggacaaaggcttgagtggatgggatggatcaacacttacactggtgacccaacatatgcagatgatttcaagggcagagtcaccattaccagggacacatccgcgagcacagcctacatggagctgagcagcctgagatctgaagacacggctgtgtattactgtgcgagaattggcggtaatagtccctctgattactggggccaaggcaccactgtcacagtctcctca

SEQ ID NO: 403 - protein, 118 aa, Artificial Sequence
  Synthetic Construct
QVQLVQSGAEVKKPGASVKVSCKASGYTFTNYGMNWVRQAPGQRLEWMGWINTYTGDPTYADDFKGRVTITRDTSASTAYMELSSLRSEDTAVYYCARIGGNSPSDYWGQGTTVTVSS

SEQ ID NO: 404 - DNA, 321 bp, Artificial Sequence
  Humanized antibody sequence
  misc_feature (1)..(321): HSC16.56 VL
  CDS (1)..(321)
gagatcgtgatgacccagtcccctgccacactgtccgtgtcccctggagagagggccaccctgtcctgcaaggcctcccagtccgtgtccaacgacgtggtgtggtaccagcagaagcccggacaggctcccaggctgctgatctactacgcctccaacaggtacaccggcatccctgccaggttctccggatccggatccggcaccgagttcaccctgaccatctcctccctgcagtccgaggacttcgccgtgtactactgccagcaggactacacctccccctggacctttggccagggcaccaagctggagatcaag

SEQ ID NO: 405 - protein, 107 aa, Artificial Sequence
  Synthetic Construct
EIVMTQSPATLSVSPGERATLSCKASQSVSNDVVWYQQKPGQAPRLLIYYASNRYTGIPARFSGSGSGTEFTLTISSLQSEDFAVYYCQQDYTSPWTFGQGTKLEIK

SEQ ID NO: 406 - DNA, 354 bp, Artificial Sequence
  Humanized antibody sequence
  misc_feature (1)..(354): HSC16.56 VH
  CDS (1)..(354)
caggtgcagctggtgcagtccggcgccgaagtgaagaaacccggcgcctccgtgaaggtgtcctgcaaggcctccggctacaccttcaccaactacggcatgaactgggtgaggcaggctcctggacagggactggagtggatgggctggatcaacacctacaccggcgaacccacctacgccgacgacttcaagggcagggtgaccatgaccaccgacacctccacctccaccgcctacatggagctgaggtccctgaggtccgacgacaccgccgtgtactactgcgctaggattggcgactcctccccctccgattactggggacagggcaccctcgtgaccgtctcctcc

SEQ ID NO: 407 - protein, 118 aa, Artificial Sequence
  Synthetic Construct
QVQLVQSGAEVKKPGASVKVSCKASGYTFTNYGMNWVRQAPGQGLEWMGWINTYTGEPTYADDFKGRVTMTTDTSTSTAYMELRSLRSDDTAVYYCARIGDSSPSDYWGQGTLVTVSS

SEQ ID NO: 408 - protein, 10 aa, Artificial Sequence
  HSC16.13 CDRL1
SASSSVSYMY

SEQ ID NO: 409 - protein, 7 aa, Artificial Sequence
  HSC16.13 CDRL2
LTSNLAS

SEQ ID NO: 410 - protein, 9 aa, Artificial Sequence
  HSC16.13 CDRL3
QQWRSNPFT

SEQ ID NO: 411 - protein, 7 aa, Artificial Sequence
  HSC16.13 CDRH1
TSGMGVG

SEQ ID NO: 412 - protein, 16 aa, Artificial Sequence
  HSC16.13 CDRH2
HIWWDDVKRYSPSLKS

SEQ ID NO: 413 - protein, 14 aa, Artificial Sequence
  HSC16.13 CDRH3
IVSFDNDVVSAMDY

SEQ ID NO: 414 - protein, 11 aa, Artificial Sequence
  HSC16.15 CDRL1
RASENIYYNLA

SEQ ID NO: 415 - protein, 7 aa, Artificial Sequence
  HSC16.15 CDRL2
TANSLED

SEQ ID NO: 416 - protein, 9 aa, Artificial Sequence
  HSC16.15 CDRL3
KQAYDVPPT

SEQ ID NO: 417 - protein, 5 aa, Artificial Sequence
  HSC16.15 CDRH1
RYWIH

SEQ ID NO: 418 - protein, 17 aa, Artificial Sequence
  HSC16.15 CDRH2
YINPTTVYTEFNQNFKD

SEQ ID NO: 419 - protein, 8 aa, Artificial Sequence
  HSC16.15 CDRH3
GGSNFFDY

SEQ ID NO: 420 - protein, 10 aa, Artificial Sequence
  HSC16.25 CDRL1
SASSSVSYMH

SEQ ID NO: 421 - protein, 7 aa, Artificial Sequence
  HSC16.25 CDRL2
DSSKLAS

SEQ ID NO: 422 - protein, 9 aa, Artificial Sequence
  HSC16.25 CDRL3
QQWSSNPLT

SEQ ID NO: 423 - protein, 7 aa, Artificial Sequence
  HSC16.25 CDRH1
TSGMGVG

SEQ ID NO: 424 - protein, 16 aa, Artificial Sequence
  HSC16.25 CDRH2
DIWWDDNKYYNPSLKS

SEQ ID NO: 425 - protein, 14 aa, Artificial Sequence
  HSC16.25 CDRH3
RVNYYYDPYYAMDY

SEQ ID NO: 426 - protein, 11 aa, Artificial Sequence
  HSC16.34 CDRL1
KASQSVSNDVA

SEQ ID NO: 427 - protein, 7 aa, Artificial Sequence
  HSC16.34 CDRL2
YASNRYS

SEQ ID NO: 428 - protein, 9 aa, Artificial Sequence
  HSC16.34 CDRL3
QQDYSSPWT

SEQ ID NO: 429 - protein, 5 aa, Artificial Sequence
  HSC16.34 CDRH1
NYGMN

SEQ ID NO: 430 - protein, 17 aa, Artificial Sequence
  HSC16.34 CDRH2
WINTYTGDPTYADDFKG

SEQ ID NO: 431 - protein, 9 aa, Artificial Sequence
  HSC16.34 CDRH3
IGGNSPSDY

SEQ ID NO: 432 - protein, 11 aa, Artificial Sequence
  HSC16.56 CDRL1
KASQSVSNDVV

SEQ ID NO: 433 - protein, 7 aa, Artificial Sequence
  HSC16.56 CDRL2
YASNRYT

SEQ ID NO: 434 - protein, 9 aa, Artificial Sequence
  HSC16.56 CDRL3
QQDYTSPWT

SEQ ID NO: 435 - protein, 5 aa, Artificial Sequence
  HSC16.56 CDRH1
NYGMN

SEQ ID NO: 436 - protein, 17 aa, Artificial Sequence
  HSC16.56 CDRH2
WINTYTGEPTYADDFKG

SEQ ID NO: 437 - protein, 9 aa, Artificial Sequence
  HSC16.56 CDRH3
IGDSSPSDY

SEQ ID NO: 438-519 - skipped (82 entries)

SEQ ID NO: 520 - DNA, 339 bp, Mus musculus
  misc_feature (1)..(339): SC72.2 VL and SC72.93 VL
  CDS (1)..(339)
gatgttgtgatgacccagactccactcactttgtcggttaccattggacaaccagcttccatctcttgcaagtcaagtcagagcctcttagatagtgatggaaaaacctatttaaattggttattacagaggccaggcgagtctccaaagctcctaatctatctggtgtctaaactggactctggagtccctgacaggttcactggcagtggatcagggacagatttcacactgaaaatcagcagagtggaggctgaggatttgggagtttattactgcttgcaagctacacattttcctcagctcacgttcggtgctgggaccaagctggagctgaaa

SEQ ID NO: 521 - protein, 113 aa, Mus musculus
DVVMTQTPLTLSVTIGQPASISCKSSQSLLDSDGKTYLNWLLQRPGESPKLLIYLVSKLDSGVPDRFTGSGSGTDFTLKISRVEAEDLGVYYCLQATHFPQLTFGAGTKLELK

SEQ ID NO: 522 - DNA, 342 bp, Mus musculus
  misc_feature (1)..(342): SC72.2 VH
  CDS (1)..(342)
caggttcaactgcagcagtctggggctgagttggtgaggcctggggcttcagtgacgctgtcctgcaaggcttcgggctacacatttattgactatgaaatgcactgggtgaagcagacacctgtgcatggcctggaatggattggagctattgatcctgaaactggtggtactacctacaatcagaacttcaagggcaaggccacactgactgcagacaaatcctccaacacagcctacatggagctccgcagcctgacatctggggactctgccgtctattactgttcaagagggggtcttgactactggggccaaggcaccactctcacagtctcctca

SEQ ID NO: 523 - protein, 114 aa, Mus musculus
QVQLQQSGAELVRPGASVTLSCKASGYTFIDYEMHWVKQTPVHGLEWIGAIDPETGGTTYNQNFKGKATLTADKSSNTAYMELRSLTSGDSAVYYCSRGGLDYWGQGTTLTVSS

SEQ ID NO: 524 - DNA, 336 bp, Mus musculus
  misc_feature (1)..(336): SC72.28 VL
  CDS (1)..(336)
gatgttgtgatgacccagactccactcactttgtcggttacctttggacaaccagcttccatctcttgtaagtcaagtcagagcctcttagatagtgatggaaaaacctatttaaattggttattacagaggccaggcgagtctccaaagctcctaatctatctggtgtctaaactggactctggagtccctgacaggttcactggcagtggatcagggacagatttcacactgaaaatcagcagagtggaggctgaggatttgggagtttattactgcttgcaagctacacattttcctctcacgttcggtgctgggaccaagctggagctgaaa

SEQ ID NO: 525 - protein, 112 aa, Mus musculus
DVVMTQTPLTLSVTFGQPASISCKSSQSLLDSDGKTYLNWLLQRPGESPKLLIYLVSKLDSGVPDRFTGSGSGTDFTLKISRVEAEDLGVYYCLQATHFPLTFGAGTKLELK

SEQ ID NO: 526 - DNA, 342 bp, Mus musculus
  misc_feature (1)..(342): SC72.28 VH
  CDS (1)..(342)
gacgttcagctgcagcagtctggggctgagcttgtgaggccaggggccttagtcaagttgtcctgcaaagcttctggcttcaacattaaagactaccttatacactgggtgaagcagaggcctgaacagggcctggagtggattggatgtattgatcctgagaatggtaatactatatatgacccgaggttccagggcaaggccaaaataacatcagacacatcctccaccacagcctacctccggctcaccagcctgacatctgaggacactgccgtctattactgtggtagggggggccttgactactggggccaaggcaccactctcacagtctcctca

SEQ ID NO: 527 - protein, 114 aa, Mus musculus
DVQLQQSGAELVRPGALVKLSCKASGFNIKDYLIHWVKQRPEQGLEWIGCIDPENGNTIYDPRFQGKAKITSDTSSTTAYLRLTSLTSEDTAVYYCGRGGLDYWGQGTTLTVSS

SEQ ID NO: 528 - DNA, 336 bp, Mus musculus
  misc_feature (1)..(336): SC72.52 VL
  CDS (1)..(336)
gatattgtgataacccaggatgaactctccaatcctgtcacttctggagaatcagtttccatctcctgcaggtctagtaagagtctcctatataaggatgggaagacatacttgaattggtttctgcagagaccaggacaatctcctcagctcctgatctatttgatgtccacccgtgcatcaggagtctcagaccggtttagtggcagtgggtcaggaacagatttcaccctggaaatcagtagagtgaaggctgaggatgtgggtgtgtattactgtcaacaatttgtagagtatccgctcacgttcggtgctgggaccaagctggagctgaaa

SEQ ID NO: 529 - protein, 112 aa, Mus musculus
DIVITQDELSNPVTSGESVSISCRSSKSLLYKDGKTYLNWFLQRPGQSPQLLIYLMSTRASGVSDRFSGSGSGTDFTLEISRVKAEDVGVYYCQQFVEYPLTFGAGTKLELK

SEQ ID NO: 530 - DNA, 348 bp, Mus musculus
  misc_feature (1)..(348): SC72.52 VH
  CDS (1)..(348)
caggtccaactgcagcagcctgggtctgtgctggtgaggcctggagcttcagtgaagctgtcctgcaaggcttctggctacacattcaccagctactggatgcactgggtgaagcagaggcctggacaaggccttgagtggattggagagatttatcctaatagtggtaggactaactacaatgagaagttcaagggcaaggccacactgactgttgacacatcctccagcaccgcctacgtggatctcagcagcctgacatctgaggactctgcggtctattactgtcattactacgatgataactacggctactggggccaaggcaccactctcacagtctcctca

SEQ ID NO: 531 - protein, 116 aa, Mus musculus
QVQLQQPGSVLVRPGASVKLSCKASGYTFTSYWMHWVKQRPGQGLEWIGEIYPNSGRTNYNEKFKGKATLTVDTSSSTAYVDLSSLTSEDSAVYYCHYYDDNYGYWGQGTTLTVSS

SEQ ID NO: 532 - DNA, 321 bp, Mus musculus
  misc_feature (1)..(321): SC72.63 VL
  CDS (1)..(321)
gacatccagatgactcagtctccagcctccctatctgcatctgtgggagaaactgtcaccatgacatgtcgagcaagtgagaatatttacagtaatttagcatggtatcagcagaaacagggaaaatctcctcagctcctggtctatgctgcaacaaacttagcagatgatgtgccatcaaggttcagtggcagtggatcaggcacacagttttctctgaagatcaacagcctgcagcctgaagattttgggatttattactgtcatcatttttacggttctcctctcacgttcggtgctgggaccaagctggagctgaaa

SEQ ID NO: 533 - protein, 107 aa, Mus musculus
DIQMTQSPASLSASVGETVTMTCRASENIYSNLAWYQQKQGKSPQLLVYAATNLADDVPSRFSGSGSGTQFSLKINSLQPEDFGIYYCHHFYGSPLTFGAGTKLELK

SEQ ID NO: 534 - DNA, 357 bp, Mus musculus
  misc_feature (1)..(357): SC72.63 VH
  CDS (1)..(357)
gaggtccagctgctgcagtctggacctgagctggtgaagcctggggcttcagtgaagatgtcctgcaaggcttctggatacacactcactgactataacttgcactgggtgaagcagagccatgcaaagagccttgagtggattggatatattaacccttacaatggtgttacttcctacaaccagaggttcaagggcaaggccacattgactgtaaacaagtcctccagcacagccttcatggagttccgcagcctgacatcggaggattctgcagtctattactgtgtatctctctactatggtgacgacccgtttgcttgctggggccaagggactctggtcactgtctcaaca

SEQ ID NO: 535 - protein, 119 aa, Mus musculus
EVQLLQSGPELVKPGASVKMSCKASGYTLTDYNLHWVKQSHAKSLEWIGYINPYNGVTSYNQRFKGKATLTVNKSSSTAFMEFRSLTSEDSAVYYCVSLYYGDDPFACWGQGTLVTVST

SEQ ID NO: 536 - DNA, 333 bp, Mus musculus
  misc_feature (1)..(333): SC72.76 VL
  CDS (1)..(333)
gacattgtgctgacacagtctcctgcttccttaactgtatctctggggcagagggccaccatctcatgcagggccagccaaagtgtcagaacatctaactatagttatatgcactggtaccaacagaaaccaggacagccacccaaactcctcatcaagtatgcatccaacctagaatctggggtccctgccaggttcagtggcagtgggtctgggacagacttcaccctcaacatccatcctgtggaggaggaggatactgcaacatattactgtcagcaccattgggagattccgttcacgttcggaggggggaccaagctggaaataaaa

SEQ ID NO: 537 - protein, 111 aa, Mus musculus
DIVLTQSPASLTVSLGQRATISCRASQSVRTSNYSYMHWYQQKPGQPPKLLIKYASNLESGVPARFSGSGSGTDFTLNIHPVEEEDTATYYCQHHWEIPFTFGGGTKLEIK

SEQ ID NO: 538 - DNA, 342 bp, Mus musculus
  misc_feature (1)..(342): SC72.76 VH
  CDS (1)..(342)
caggtgcagctgaaggagtcaggacctggcctggtggcgccctcacagagcctgtccatcacctgcacagtctctgatttctcattaaccaactatgctgtacactgggttcgccagtctccaggaaagggtctggagtggctgggagtgatatggagtgatggaaacacagactataatgcgcctttcatatctagactgagcatcagcaaggacaactccaagagccaagttttctttaaaatgaacagtctgcaagctgatgacacagccatatactactgtgccagctatggtgattctgcttactggggccaagggactctggtcactgtctctgca

SEQ ID NO: 539 - protein, 114 aa, Mus musculus
QVQLKESGPGLVAPSQSLSITCTVSDFSLTNYAVHWVRQSPGKGLEWLGVIWSDGNTDYNAPFISRLSISKDNSKSQVFFKMNSLQADDTAIYYCASYGDSAYWGQGTLVTVSA

SEQ ID NO: 540 - DNA, 336 bp, Mus musculus
  misc_feature (1)..(336): SC72.91 VL
  CDS (1)..(336)
gatgttgtgctgacccaaactccactctccctgcctgtcagtcttggagatcaagcctccatttattgtagatctagtcagagcattgtacatagtaatggaaacacctatttcgaatggtacctgcagaaaccaggccagtctccaaagctcctgatctacaaagtttccaaccgattgtctggggtcccagacaggttcagtggcagtggttcagggacagacttcacactcaagatcagcagagtggaggctgttgatctgggaatttattactgctttcaagcttcacatgttccgttcacgttcggtgctgggaccaagctggagctgaaa

SEQ ID NO: 541 - protein, 112 aa, Mus musculus
DVVLTQTPLSLPVSLGDQASIYCRSSQSIVHSNGNTYFEWYLQKPGQSPKLLIYKVSNRLSGVPDRFSGSGSGTDFTLKISRVEAVDLGIYYCFQASHVPFTFGAGTKLELK

SEQ ID NO: 542 - DNA, 372 bp, Mus musculus
  misc_feature (1)..(372): SC72.91 VH
  CDS (1)..(372)
caggttcagctgcagcagtctggacctgaggtggtgaagcctggggcttcagtgaagttgtcctgcaaggcttctggctacaccttcacaacctacgatataaactgggtgaagcagaggcctggacagggacttgagtggattggatggatttattttagagatggtactaataagtacaatgagaagttcaagggcaaggccacattgactgtagacacatcctccagcacagcgtacatggagctccacagcctgacatctgaggactctgcggtctatttctgtgcaagcgtctatgatggttactacgtttcgggatttgatattatggactattggggtcaaggaacctcagtcaccgtttcctca

SEQ ID NO: 543 - protein, 124 aa, Mus musculus
QVQLQQSGPEVVKPGASVKLSCKASGYTFTTYDINWVKQRPGQGLEWIGWIYFRDGTNKYNEKFKGKATLTVDTSSSTAYMELHSLTSEDSAVYFCASVYDGYYVSGFDIMDYWGQGTSVTVSS

SEQ ID NO: 544 - DNA, 321 bp, Mus musculus
  misc_feature (1)..(321): SC72.94 VL
  CDS (1)..(321)
gacatccaaatgaaccagtctccatccagtctgtctgcatccctcggagacacaattaccatcacttgccgtgccagtcagggcattagtatttggttaagctggtaccagcagaaaccaggaaatattcctaaactattgatctataaggcttccaacttgcacacaggagtcccaccaagctttagtggcagtggatctggaacagatttcacattaactatcagcagcctacagcctgaagacattgccacttactactgtctacagagtcaaagttatccgtggacgttcggtgggggcaccaagctagaaatcaaa

SEQ ID NO: 545 - protein, 107 aa, Mus musculus
DIQMNQSPSSLSASLGDTITITCRASQGISIWLSWYQQKPGNIPKLLIYKASNLHTGVPPSFSGSGSGTDFTLTISSLQPEDIATYYCLQSQSYPWTFGGGTKLEIK

SEQ ID NO: 546 - DNA, 336 bp, Mus musculus
  misc_feature (1)..(336): SC72.94 VH
  CDS (1)..(336)
caggtccaactgcagcagcctgggactgaactggtgaagcctggggcttcagtgaagctgtcctgcaaggcttctgcctacaccttcaccagcctctggattcactgggtgaagcagaggcctggacaaggccttgagtggattggagatattaatcctagtattggtgatacttactacaatgagaggttcaagagcaaggccacactgactgtagacaaatcctccagcacagcctacatgcagctcagcagcctgacatctgaggactctgcggtttattattgtacaactggcgactcctggggccaaggcaccactctcacagtctcctca

SEQ ID NO: 547 - protein, 112 aa, Mus musculus
QVQLQQPGTELVKPGASVKLSCKASAYTFTSLWIHWVKQRPGQGLEWIGDINPSIGDTYYNERFKSKATLTVDKSSSTAYMQLSSLTSEDSAVYYCTTGDSWGQGTTLTVSS

SEQ ID NO: 548 - DNA, 321 bp, Mus musculus
  misc_feature (1)..(321): SC72.96 VL
  CDS (1)..(321)
gacatccagatgactcagtctccagcctccctatctgcatctgtgggagaaactgtcaccatgacatgtcgagcaagtgaaaatattcacagtaatttagtatggtatcagcagaaacagggaaaatctcctcaactcctggtctatgctgcaacaaacttagcagatggtgtgccatcaaggttcagtggcagtggttcaggctcacagttttctctgaagatcgacagcctgcagcctgaagattttgggagttatctctgtcaacatttttatggcactcctcgtaccttcggtggaggcaccaagctggaaatcaaa

SEQ ID NO: 549 - protein, 107 aa, Mus musculus
DIQMTQSPASLSASVGETVTMTCRASENIHSNLVWYQQKQGKSPQLLVYAATNLADGVPSRFSGSGSGSQFSLKIDSLQPEDFGSYLCQHFYGTPRTFGGGTKLEIK

SEQ ID NO: 550 - DNA, 360 bp, Mus musculus
  misc_feature (1)..(360): SC72.96 VH
  CDS (1)..(360)
gaggtccagctgcaacagtcaggacctgagctggtgaagcctggggcttcagtgaagatgtcctgcaaggcttctggatacacactcactgcctacaacatacactgggtgaagcagagccatggaaagagccttgagtggattggatttattaaccctcacagtggtggaactacctacaacgagaagttcaagggcaaggccacattgactgtaaataagtcctccagcacagccaacatggagctccgcagtctgacatcggaggattctgcagtctattactgtgcaagtatttattactacggtagtagctactttgaccactggggccaaggcaccactctcacagtctcctca

SEQ ID NO: 551 - protein, 120 aa, Mus musculus
EVQLQQSGPELVKPGASVKMSCKASGYTLTAYNIHWVKQSHGKSLEWIGFINPHSGGTTYNEKFKGKATLTVNKSSSTANMELRSLTSEDSAVYYCASIYYYGSSYFDHWGQGTTLTVSS

SEQ ID NO: 552 - DNA, 339 bp, Mus musculus
  misc_feature (1)..(339): SC72.132 VL
  CDS (1)..(339)
gacattgtgatgtcacagtctccatcctccctagctgtgtcagttggagagaaggttactctgagctgcaagtccagtcagacccttttatatagtagcaatcaacagaactacttggcctggtaccaacagaaaccagggcagtctcctaaactgctgatttactgggcatccactagggaatctggggtccctgatcgcttcacaggcagtggatctgggacagatttcacgctcaccatcagcagtgtgaaggctgaagacctggcagtttattactgtcaccaatattatacgtatccattcacgttcggctcggggacaaagttggaaataaaa

SEQ ID NO: 553 - protein, 113 aa, Mus musculus
DIVMSQSPSSLAVSVGEKVTLSCKSSQTLLYSSNQQNYLAWYQQKPGQSPKLLIYWASTRESGVPDRFTGSGSGTDFTLTISSVKAEDLAVYYCHQYYTYPFTFGSGTKLEIK

SEQ ID NO: 554 - DNA, 360 bp, Mus musculus
  misc_feature (1)..(360): SC72.132 VH
  CDS (1)..(360)
gaagtgaagctggtggagtctgagggaggcttagtgcagcctggaagttccatgaaactctcctgcacagcctctggattcactttcagtgactattacatggcttgggtccgccaggttccagaaaagggtctagaatgggttgcaaccattgattatgatggtagtaacacctactatctggactccttgaagagccgtttcatcatctcgagagacaatgcaaagaacattctatacctgcaaatgagcagtctgaagtctgaggacacagccacgtattactgtgcaagagatggaggttacgacgaggactactttgactactggggccaaggcaccactctcacagtctcctca

SEQ ID NO: 555 - protein, 120 aa, Mus musculus
EVKLVESEGGLVQPGSSMKLSCTASGFTFSDYYMAWVRQVPEKGLEWVATIDYDGSNTYYLDSLKSRFIISRDNAKNILYLQMSSLKSEDTATYYCARDGGYDEDYFDYWGQGTTLTVSS

SEQ ID NO: 556 - DNA, 333 bp, Mus musculus
  misc_feature (1)..(333): SC72.165 VL
  CDS (1)..(333)
gacattgtgctgacccaatctccagcttctttggctgtgtctccagggcagagggccaccatctcctgcaaggccagccaaagtgttggttatgatggtgatacttatttgagctggtaccaacagaaaccaggacagccacccaaactcctcatctatggtgtatctattctagaatctgggatcccagccaggtttagtggcagtgggtctgggacagacttcaccctcaacatccatcctgtggaagaggaggatgctgcaacctattactgtcagcaaagtagtgaggatccgtacacgttcggaggggggaccaagttggagataaaa

SEQ ID NO: 557 - protein, 111 aa, Mus musculus
DIVLTQSPASLAVSPGQRATISCKASQSVGYDGDTYLSWYQQKPGQPPKLLIYGVSILESGIPARFSGSGSGTDFTLNIHPVEEEDAATYYCQQSSEDPYTFGGGTKLEIK

SEQ ID NO: 558 - DNA, 342 bp, Mus musculus
  misc_feature (1)..(342): SC72.165 VH
  CDS (1)..(342)
caggtccaactgcagcagcctggtgctgagcttgtgaggcctggggcctcagtgagactgtcctgcaaggcttctggctatagtttcaccagctactggataaactgggtgaagcagaggcctggacaaggccttgagtggattggaaatatttatcctggaagtagtaatactaactacaatgagaagttcaagaggaaggccacactgactgtagacacatcctccagcacagcctacatgcagctcagcagcctgacatctgacgactctgcggtctattattgtgcaagatcggagagtgactactggggccaaggcaccactctcacagtctcctca

SEQ ID NO: 559 - protein, 114 aa, Mus musculus
QVQLQQPGAELVRPGASVRLSCKASGYSFTSYWINWVKQRPGQGLEWIGNIYPGSSNTNYNEKFKRKATLTVDTSSSTAYMQLSSLTSDDSAVYYCARSESDYWGQGTTLTVSS

SEQ ID NO: 560 - DNA, 333 bp, Mus musculus
  misc_feature (1)..(333): SC72.181 VL
  CDS (1)..(333)
gacattgtgctgacccaatctccagcttctttggctgtgtctctagggcagagggccaccatctcctgcaaggccagccaaagtgttgatgatgatggtggtacttatatgagctggtaccaacagaaaccaggacagccacccaaactcctcatctatggtgtattcattctagaatctgggatcccagccaggtttagtggcagtgggtctgggacagacttcaccctcaacatccatcctgtggaagaggaggatgctgcaacctattactgtcagcaaagtaatgaggatccgtacacgttcggaggggggaccaagctggaaataaaa

SEQ ID NO: 561 - protein, 111 aa, Mus musculus
DIVLTQSPASLAVSLGQRATISCKASQSVDDDGGTYMSWYQQKPGQPPKLLIYGVFILESGIPARFSGSGSGTDFTLNIHPVEEEDAATYYCQQSNEDPYTFGGGTKLEIK

SEQ ID NO: 562 - DNA, 342 bp, Mus musculus
  misc_feature (1)..(342): SC72.181 VH
  CDS (1)..(342)
caggtccaactgcagcagcctggtgctgaggttgtgaagcctggggcctcagtgagactgtcctgcaaggcttctggctacactttcaccagctactggataaactgggtgaaacagaggcctggacaaggccttgagtggattggtaatatttatcctggtagtagtagtactaactacaatgagaagttcaagagcaaggccacactgactgtagacacatcctccagcacagcctacatgcagctcagcagcctgacatctgacgactctgcggtctattattgttcaagatcggagagtgactactggggccaaggcaccactctcacagtctcctca

SEQ ID NO: 563 - protein, 114 aa, Mus musculus
QVQLQQPGAEVVKPGASVRLSCKASGYTFTSYWINWVKQRPGQGLEWIGNIYPGSSSTNYNEKFKSKATLTVDTSSSTAYMQLSSLTSDDSAVYYCSRSESDYWGQGTTLTVSS

SEQ ID NO: 564 - DNA, 321 bp, Mus musculus
  misc_feature (1)..(321): SC72.201 VL
  CDS (1)..(321)
gacatccagatgactcagtctccagcctccctatctgtatctgtgggagaaactgtcaccatcacatgtcgagcaagtgaaaatatttacagtagtttagcatggtatcagcagaaacagggaaattctcctcagctcctggtctatgctgcaacaaagttagcagatggtgtgccatcaaggttcagtggcagtggatcaggcacacagtattccctcaagatcaacagcctgcagtctgaagattttgggagttattactgtcaacatttttggggtactacgtggacgttcggtggaggcaccaagctggaaatcaaa

SEQ ID NO: 565 - protein, 107 aa, Mus musculus
DIQMTQSPASLSVSVGETVTITCRASENIYSSLAWYQQKQGNSPQLLVYAATKLADGVPSRFSGSGSGTQYSLKINSLQSEDFGSYYCQHFWGTTWTFGGGTKLEIK

SEQ ID NO: 566 - DNA, 345 bp, Mus musculus
  misc_feature (1)..(345): SC72.201 VH
  CDS (1)..(345)
gaagtgaaccttgaggagtctggaggaggcttggtgcaacctggaggatccatgaaactctcctgtgttgcctctggattcactttcagtaactactggatgaactgggtccgccagtctccagagaaggggcttgagtgggttgctcaaattagatcgaaatctgataattatgcaacacattatgcggagtctgtgaaagggaggttcaccatctcaagagatgattccaaaagtagtgtctacctgcaaatgaacaacttaaggtctgaagacactggaatttattactgcagaactggtcccgatgtctggggcacagggaccacggtcaccgtctcctca

SEQ ID NO: 567 - protein, 115 aa, Mus musculus
EVNLEESGGGLVQPGGSMKLSCVASGFTFSNYWMNWVRQSPEKGLEWVAQIRSKSDNYATHYAESVKGRFTISRDDSKSSVYLQMNNLRSEDTGIYYCRTGPDVWGTGTTVTVSS

SEQ ID NO: 568 - DNA, 333 bp, Mus musculus
  misc_feature (1)..(333): SC72.216 VL
  CDS (1)..(333)
gacattgtggtgacccaatctccagcttctttggctgtgtctctagggcagagggccaccatctcctgcaaggccagccaaagtgttgattatgatggtgatagttatatgaactggtaccaacagaaaccaggacagccacccaaactcctcatctatggtgcatccaatctagaatctgggatcccagccaggtttagtggcagtgggtctgggacagacttcaccctcaacatccatcctgtggaggaggaggatgctgcaacctattactgtcagcaaagtaatgaggatccgtacacgttcggaggggggaccaagctggaaataaaa

SEQ ID NO: 569 - protein, 111 aa, Mus musculus
DIVVTQSPASLAVSLGQRATISCKASQSVDYDGDSYMNWYQQKPGQPPKLLIYGASNLESGIPARFSGSGSGTDFTLNIHPVEEEDAATYYCQQSNEDPYTFGGGTKLEIK

SEQ ID NO: 570 - DNA, 360 bp, Mus musculus
  misc_feature (1)..(360): SC72.216 VH
  CDS (1)..(360)
cagatccagttggtgcagtctggacctgagctgaggaagcctggagagacagtcaagatctcctgcaaggcttctgggtatacgttcacaaactatccaatgcactgggtgaaacaggctccaggaaagggtttcaagtggatgggctggataaacacctactctggagtgccatcatatgcagatgacttcaagggacggtttgccttctctttggaaacctctgccagctctgcatatttgcagatcaacaacctcaaaaatgaggacatggctacatatttctgtgcaagacataattacaatagttacgacgtgtttgcttactggggccaagggactctggtcactgtctctgca

SEQ ID NO: 571 - protein, 120 aa, Mus musculus
QIQLVQSGPELRKPGETVKISCKASGYTFTNYPMHWVKQAPGKGFKWMGWINTYSGVPSYADDFKGRFAFSLETSASSAYLQINNLKNEDMATYFCARHNYNSYDVFAYWGQGTLVTVSA

SEQ ID NO: 572 - DNA, 342 bp, Mus musculus
  misc_feature (1)..(342): SC72.93 VH
  CDS (1)..(342)
caggttcaactgcagcagtctggggctgagctggtgaggcctggggcttcagtgacgctgtcctgcaaggcttcgggctacatatttattgactatgaaatgcactgggtgaagcagacacctgtgcatggcctggaatggattggatctattgatcctgagactggtgatactgtctacaatcagaagttcaagggcaaggccacactgactgcagacaaatcctccagcacagcctacatggagctccgcagcctgacatctgaggactctgccgtctattattgttcaagagggggtcttgactactggggccaaggcaccactctcacagtctcctca

SEQ ID NO: 573 - protein, 114 aa, Mus musculus
QVQLQQSGAELVRPGASVTLSCKASGYIFIDYEMHWVKQTPVHGLEWIGSIDPETGDTVYNQKFKGKATLTADKSSSTAYMELRSLTSEDSAVYYCSRGGLDYWGQGTTLTVSS
